(19) United States
(12) Patent Application Publication
(10) Pub. No.: US 2024/0117348 A1
(43) Pub. Date: Apr. 11, 2024

(54) COAGULATION FACTOR X (F10) iRNA COMPOSITIONS AND METHODS OF USE THEREOF

(71) Applicant: Alnylam Pharmaceuticals, Inc., Cambridge, MA (US)

(72) Inventors: Mark Keating, Weston, MA (US); Jeffrey Zuber, Somerville, MA (US)

(21) Appl. No.: 18/206,116

(22) Filed: Jun. 6, 2023

Related U.S. Application Data
(63) Continuation of application No. PCT/US2021/062113, filed on Dec. 7, 2021.
(60) Provisional application No. 63/158,391, filed on Mar. 9, 2021.
(60) Provisional application No. 63/122,534, filed on Dec. 8, 2020.

(51) Int. Cl. C12N 15/113; A61P 7/02

(52) U.S. Cl. CPC C12N 15/113; A61P 7/02; C12N 2310/11; C12N 2310/3125; C12N 2310/315

(57) ABSTRACT

The present invention relates to RNAi agents, e.g., dsRNA agents, targeting the Coagulation Factor X (F10) gene. The invention also relates to methods of using such RNAi agents to inhibit expression of an F10 gene and to methods of treating or preventing an F10-associated disease, e.g., a disorder associated with thrombosis, in a subject.

### RELATED APPLICATIONS

[0001] This application is a 35 § U.S.C. 111(a) continuation application which claims the benefit of priority to PCT/US2021/062113, filed on Dec. 7, 2021, which, in turn, claims the benefit of priority to U.S. Provisional Application No. 63/122,534, filed on Dec. 8, 2020, and U.S. Provisional Application No. 63/158,391, filed on Mar. 9, 2021. The entire contents of each of the foregoing applications are incorporated herein by reference.

### SEQUENCE LISTING

[0002] The instant application contains a Sequence Listing which has been filed electronically in XML file format and is hereby incorporated by reference in its entirety. Said XML copy, created on Nov. 27, 2023, is named 121301_014003_SL.xml and is 2,970,244 bytes in size.

### BACKGROUND OF THE INVENTION

[0003] Coagulation Factor X (F10) is a vitamin K-dependent serine protease that serves a central role in the coagulation cascade at the point of convergence of the intrinsic and extrinsic pathways. Factor X is synthesized by the liver. It undergoes extensive post-translational modifications (glycosylation, gamma-carboxylation, and beta-hydroxylation) and is secreted into the plasma. Factor X circulates in the bloodstream in an inactive form until the coagulation system is turned on, or activated by, an injury that damages blood vessels. Factor X can be activated by the activated form of Factor IX or by the activated form of Factor VII. Upon activation, Factor X forms a high affinity macromolecular complex with other components of the prothrombinase complex: the activated form of Factor V, negatively-charged phospholipid surfaces and calcium. This prothrombinase complex activates prothrombin to thrombin. The activated thrombin, in turn, cleaves fibrinogen to form fibrin, which polymerizes to form the dense meshwork that makes up the majority of a clot (see, e.g., FIG. 1).

[0004] Unregulated activation or activity of Factor X may lead to generation of excess fibrin and excess clotting, thereby leading to the development of disorders associated with thrombosis. Formation of excess clotting within a blood vessel results in thrombosis which prevents blood from flowing normally through the circulatory system. When a blood clot forms in the veins, it is known as venous thromboembolism such as deep vein thrombosis. If the venous clots break off, these clots can travel through the heart to the lung, where they may block a pulmonary blood vessel and cause a pulmonary embolism. When a clot forms in the arteries, it is called atherothrombosis, which can lead to a heart attack and stroke.

[0005] The common treatment for thrombosis is typically non-selective anti-coagulant therapy. Unfortunately, however, the lack of specificity of such therapies can lead to excessive bleeding.

[0006] Accordingly, there is a need in the art for more effective treatments for subjects suffering from or prone to suffering from thrombosis.

### SUMMARY OF THE INVENTION

[0007] The present invention provides iRNA compositions which effect the RNA-induced silencing complex (RISC)-mediated cleavage of RNA transcripts of a gene encoding coagulation Factor X (F10). The F10 may be within a cell, e.g., a cell within a subject, such as a human subject.

[0008] Accordingly, in one aspect the invention provides a double stranded ribonucleic acid (dsRNA) agent for inhibiting expression of Factor X (F10) in a cell, wherein the dsRNA agent comprises a sense strand and an antisense strand forming a double stranded region, wherein the sense strand comprises at least 15 contiguous nucleotides differing by no more than 0, 1, 2, or 3 nucleotides from the nucleotide sequence of SEQ ID NO:1 and the antisense strand comprises at least 15 contiguous nucleotides differing by no more than 1, 2, or 3 nucleotides from the nucleotide sequence of SEQ ID NO:8. In certain embodiments, the sense strand comprises at least 15 contiguous nucleotides of the nucleotide sequence of SEQ ID NO:1 and the antisense strand comprises at least 15 contiguous nucleotides of the nucleotide sequence of SEQ ID NO:8. In certain embodiments, the sense strand comprises at least 17 contiguous nucleotides of the nucleotide sequence of SEQ ID NO:1 and the antisense strand comprises at least 17 contiguous nucleotides of the nucleotide sequence of SEQ ID NO:8. In certain embodiments, the sense strand comprises at least 19 contiguous nucleotides of the nucleotide sequence of SEQ ID NO:1 and the antisense strand comprises at least 19 contiguous nucleotides of the nucleotide sequence of SEQ ID NO:8.

[0009] In another aspect, the present invention provides a double stranded ribonucleic acid (dsRNA) for inhibiting expression of coagulation Factor X (F10) in a cell, wherein the dsRNA agent comprises a sense strand and an antisense strand forming a double stranded region, wherein the antisense strand comprises a region of complementarity to an mRNA encoding F10, and wherein the region of complementarity comprises at least 15 contiguous nucleotides differing by no more than 0, 1, 2, or 3 nucleotides from any one of the antisense nucleotide sequences in any one of Tables 2-3. In certain embodiments, the region of complementarity comprises at least 15 contiguous nucleotides of any one of the antisense nucleotide sequences in any one of Tables 2-3. In certain embodiments, the region of complementarity comprises at least 17 contiguous nucleotides of any one of the antisense nucleotide sequences in any one of Tables 2-3. In certain embodiments, the region of complementarity comprises at least 19 contiguous nucleotides of any one of the antisense nucleotide sequences in any one of Tables 2-3. In certain embodiments, the region of complementarity comprises at least 20 contiguous nucleotides of any one of the antisense nucleotide sequences in any one of Tables 2-3. In certain embodiments, the region of complementarity comprises at least 21 contiguous nucleotides of any one of the antisense nucleotide sequences in any one of Tables 2-3.

[0010] In one embodiment, the dsRNA agent comprises a sense strand comprising at least 15 contiguous nucleotides differing by no more than three nucleotides from any one of the nucleotide sequences of the sense strands in any one of Tables 2-17 and an antisense strand comprising at least 15 contiguous nucleotides differing by no more than three nucleotides from any one of the nucleotide sequences of the antisense strands in any one of Tables 2-17.

[0011] In one embodiment, the dsRNA agent comprises a sense strand comprising at least 15 contiguous nucleotides differing by no more than two nucleotides from any one of the nucleotide sequences of the sense strands in any one of Tables 2-17 and an antisense strand comprising at least 15 contiguous nucleotides differing by no more than two nucleotides from any one of the nucleotide sequences of the antisense strands in any one of Tables 2-17.

[0012] In one embodiment, the dsRNA agent comprises a sense strand comprising at least 15 contiguous nucleotides differing by no more than one nucleotide from any one of the nucleotide sequences of the sense strands in any one of Tables 2-17 and an antisense strand comprising at least 15 contiguous nucleotides differing by no more than one nucleotide from any one of the nucleotide sequences of the antisense strands in any one of Tables 2-17.

[0013] In one embodiment, the dsRNA agent comprises a sense strand comprising a nucleotide sequence selected from the group consisting of any one of the nucleotide sequences of the sense strands in any one of Tables 2-17 and an antisense strand comprising a nucleotide sequence selected from the group consisting of any one of the nucleotide sequences of the antisense strands in any one of Tables 2-17.

[0014] In one embodiment, the dsRNA agent comprises at least one modified nucleotide.

[0015] In one embodiment, substantially all of the nucleotides of the sense strand comprise a modification; substantially all of the nucleotides of the antisense strand comprise a modification; or substantially all of the nucleotides of the sense strand and substantially all of the nucleotides of the antisense strand comprise a modification.

[0016] In one embodiment, all of the nucleotides of the sense strand comprise a modification; all of the nucleotides of the antisense strand comprise a modification; or all of the nucleotides of the sense strand and all of the nucleotides of the antisense strand comprise a modification.

[0017] In one embodiment, at least one of the modified nucleotides is selected from the group consisting of a deoxy-nucleotide, a 3′-terminal deoxythimidine (dT) nucleotide, a 2′-O-methyl modified nucleotide, a 2′-fluoro modified nucleotide, a 2′-deoxy-modified nucleotide, a locked nucleotide, an unlocked nucleotide, a conformationally restricted nucleotide, a constrained ethyl nucleotide, an abasic nucleotide, a 2′-amino-modified nucleotide, a 2′-O-allyl-modified nucleotide, 2′-C-alkyl-modified nucleotide, a 2′-methoxyethyl modified nucleotide, a 2′-O-alkyl-modified nucleotide, a morpholino nucleotide, a phosphoramidate, a non-natural base comprising nucleotide, a tetrahydropyran modified nucleotide, a 1,5-anhydrohexitol modified nucleotide, a cyclohexenyl modified nucleotide, a nucleotide comprising a phosphorothioate group, a nucleotide comprising a methylphosphonate group, a nucleotide comprising a 5′-phosphate, a nucleotide comprising a 5′-phosphate mimic, a thermally destabilizing nucleotide, a glycol modified nucleotide (GNA), and a 2-0-(N-methylacetamide) modified nucleotide; and combinations thereof.

[0018] In one embodiment, the modifications on the nucleotides are selected from the group consisting of LNA, glycol nucleic acid (GNA), hexitol nucleic acid (HNA), a cyclohexene nucleic acid (CeNA), 2′-methoxyethyl, 2′-O-alkyl, 2′-O-allyl, 2′-C-allyl, 2′-fluoro, 2′-deoxy, 2′-hydroxyl, and glycol; and combinations thereof.

[0019] In one embodiment, at least one of the modified nucleotides is selected from the group consisting of a deoxy-nucleotide, a 2′-O-methyl modified nucleotide, a 2′-fluoro modified nucleotide, a 2′-deoxy-modified nucleotide, a glycol modified nucleotide (GNA), e.g., Ggn, Cgn, Tgn, or Agn, and, a vinyl-phosphonate nucleotide; and combinations thereof.

[0020] In another embodiment, at least one of the modifications on the nucleotides is a thermally destabilizing nucleotide modification.

[0021] In one embodiment, the thermally destabilizing nucleotide modification is selected from the group consisting of an abasic modification; a mismatch with the opposing nucleotide in the duplex; a destabilizing sugar modification, a 2′-deoxy modification, an acyclic nucleotide, an unlocked nucleic acid (UNA), and a glycerol nucleic acid (GNA).

[0022] The double stranded region may be 19-30 nucleotide pairs in length; 19-25 nucleotide pairs in length; 19-23 nucleotide pairs in length; 23-27 nucleotide pairs in length; or 21-23 nucleotide pairs in length.

[0023] In one embodiment, each strand is independently no more than 30 nucleotides in length.

[0024] In one embodiment, the sense strand is 21 nucleotides in length and the antisense strand is 23 nucleotides in length.

[0025] The region of complementarity may be at least 17 nucleotides in length; 19-23 nucleotides in length; or 19 nucleotides in length.

[0026] In one embodiment, at least one strand comprises a 3′ overhang of at least 1 nucleotide. In another embodiment, at least one strand comprises a 3′ overhang of at least 2 nucleotides.

[0027] In one embodiment, the dsRNA agent further comprises a ligand.

[0028] In one embodiment, the ligand is conjugated to the 3′ end of the sense strand of the dsRNA agent.

[0029] In one embodiment, the ligand is an N-acetylgalactosamine (GalNAc) derivative.

[0030] In one embodiment, the ligand is one or more GalNAc derivatives attached through a monovalent, bivalent, or trivalent branched linker.

[0031] In one embodiment, the ligand is

[chemical structure]

[0032] In one embodiment, the dsRNA agent is conjugated to the ligand as shown in the following schematic

[chemical structure]

and, wherein X is O or S.

[0033] In one embodiment, the X is O.

[0034] In one embodiment, the dsRNA agent further comprises at least one phosphorothioate or methylphosphonate internucleotide linkage.

[0035] In one embodiment, the phosphorothioate or methylphosphonate internucleotide linkage is at the 3′-terminus of one strand, e.g., the antisense strand or the sense strand.

[0036] In another embodiment, the phosphorothioate or methylphosphonate internucleotide linkage is at the 5′-terminus of one strand, e.g., the antisense strand or the sense strand.

[0037] In one embodiment, the phosphorothioate or methylphosphonate internucleotide linkage is at both the 5′- and 3′-terminus of one strand, e.g., the antisense strand or the sense strand. In one embodiment, the strand is the antisense strand.

[0038] In one embodiment, the base pair at the 1 position of the 5′-end of the antisense strand of the duplex is an AU base pair.

[0039] The present invention also provides cells containing any of the dsRNA agents of the invention and pharmaceutical compositions comprising any of the dsRNA agents of the invention.

[0040] The pharmaceutical composition of the invention may include the dsRNA agent in an unbuffered solution, e.g., saline or water, or the pharmaceutical composition of the invention may include the dsRNA agent in a buffer solution, e.g., a buffer solution comprising acetate, citrate, prolamine, carbonate, or phosphate or any combination thereof; or phosphate buffered saline (PBS).

[0041] In one aspect, the present invention provides a method of inhibiting expression of a coagulation Factor X (F10) gene in a cell. The method includes contacting the cell with any of the dsRNA agents of the invention or any of the pharmaceutical compositions of the invention, thereby inhibiting expression of the F10 gene in the cell.

[0042] In one embodiment, the cell is within a subject, e.g., a human subject, e.g., a subject having a coagulation Factor X-(F10)-associated disease. Such diseases are typically associated with excess formation of blood clots, e.g., thrombosis. In certain embodiments, the F10-associated disease or disorder is a disease or disorder associated with thrombosis. Non-limiting examples of disorders or diseases associated with thrombosis include venous thrombosis, e.g., deep vein thrombosis; genetic thrombophilia, e.g., prothrombin thrombophilia; plurpura fulminans; acquired thrombophilia, e.g., antiphospholipid syndrome and systemic lupus erythematosus; drug induced thrombophilia; arterial thrombosis, e.g., myocardial infarction and peripheral arterial disease; thromboembolic disease, e.g., pulmonary embolus embolic and ischemic stroke; atrial fibrillation; post-surgery deep vein thrombosis; cancer thrombosis or infectious disease thrombosis.

[0043] In one embodiment, contacting the cell with the dsRNA agent inhibits the expression of F10 by at least 50%, 60%, 70%, 80%, 90%, or 95%.

[0044] In one embodiment, inhibiting expression of F10 decreases F10 protein level in serum of the subject by at least 50%, 60%, 70%, 80%, 90%, or 95%.

[0045] In one aspect, the present invention provides a method of treating a subject having a disorder that would benefit from reduction in coagulation Factor X (F10) expression. The method includes administering to the subject a therapeutically effective amount of any of the dsRNA agents of the invention or any of the pharmaceutical compositions of the invention, thereby treating the subject having the disorder that would benefit from reduction in F10 expression.

[0046] In another aspect, the present invention provides a method of preventing development of a disorder that would benefit from reduction in coagulation Factor X (F10) expression in a subject having at least one sign or symptom of a disorder who does not yet meet the diagnostic criteria for that disorder. The method includes administering to the subject a prophylactically effective amount of any of the dsRNA agents of the invention or any of the pharmaceutical compositions of the invention, thereby preventing the subject from progressing to meet the diagnostic criteria of the disorder that would benefit from reduction in F10 expression.

[0047] In one embodiment, the disorder is a coagulation Factor X-(F10)-associated disorder. In certain embodiments, the F10-associated disorder is a disorder associated with thrombosis. Non-limiting examples of disorders or diseases associated with thrombosis include venous thrombosis, e.g., deep vein thrombosis; genetic thrombophilia, e.g., prothrombin thrombophilia; plurpura fulminans; acquired thrombophilia, e.g., antiphospholipid syndrome and systemic lupus erythematosus; drug induced thrombophilia; arterial thrombosis, e.g., myocardial infarction and peripheral arterial disease; thromboembolic disease, e.g., pulmonary embolus embolic and ischemic stroke; atrial fibrillation; post-surgery deep vein thrombosis; cancer thrombosis or infectious disease thrombosis.

[0048] In one embodiment, the subject is a human.

[0049] In one embodiment, the dsRNA agent is administered to the subject at a dose of about 0.01 mg/kg to about 50 mg/kg.

[0050] In one embodiment, the dsRNA agent is administered to the subject subcutaneously.

[0051] In one emdobiment, the method further comprises determining the level of F10 in a sample from the subject. In one embodiment, the level of F10 in the subject sample(s) is an F10 protein level in a blood or serum sample(s).

[0052] In certain embodiments, the methods of the invention further comprise administering to the subject an additional therapeutic agent. In certain embodiments, the additional therapeutic agent is an anticoagulant. In some emboidments, the anticoagulant includes heparin, enoxaparin (Lovenox), dalteparin (Fragmin), fondaparinux (Arixtra), warfarin (Coumadin, Jantoven), dabigatran (Pradaxa), rivaroxaban (Xarelto), apixaban (Eliquis), edoxaban (Savaysa), argatroban or any combination thereof. In some embodiments, the additional therapeutic agent includes a thrombolytic. In certain embodiments, the thrombolytic includes antistreplase (Eminase), tissue plasminogen activator (tPA), urokinase-type plasminogen activator (uPA), or any combination thereof. In some embodiments, the additional therapeutic agent is an immunosuppressant. In certain embodiments, the immunosuppresant includes corticosteroid, azathioprine, cyclosporine A, or any combination thereof. In some embodiments, the additional therapeutic agent is hormone replacement therapy. In certain embodiments, the hormone replacement therapy includes estrogen, gestagen, androgen or any combination thereof. In some embodiments, the additional therapeutic agent is an antibiotic. In some embodiments, the additional therapeutic agent is an antihistamine agent. In some embodiments, the additional therapeutic agent is a mast cell stablizer. In certain embodiments, the mast cell stabilizer includes cromoglicic acid (Cromolyn), lodoxamide (Alomide), or any combination thereof. In some embodiments, the additional therapeutic agent is an anti-proliferative agent. In some embodiments, the additional therapeutic agent is an oral contraceptive. In some embodiments, the additional therapeutic agent is a fresh frozen plasma or a plasminogen concentrate. In some embodiments, the additional therapeutic agent is hyaluronidase. In some embodiments, the additional therapeutic agent is alpha chymotrypsin. In certain embodiment, the additional therapeutic agent is a filter inserted into a large vein that prevents clots that break loose from lodging in the patient's lungs. In certain embodiments, the additional therapeutic agent is selected from the group consisting of an anticoagulant, an F10 inhibitor and a thrombin inhibitor.

[0053] The invention also provides uses of the dsRNA agents and the pharmaceutical compositions provided herein for treatment of an F10-associated disorder. In certain embodiments, the uses include any of the methods provided by the invention.

[0054] The invention provides kits or pharmaceutical compositions comprising a dsRNA agent of the invention. In certain embodiments, the invention provides kits for practicing a method of the invention.

[0055] The present invention is further illustrated by the following detailed description and drawings.

### BRIEF DESCRIPTION OF THE DRAWINGS

[0056] FIG. 1 is a schematic of the coagulation cascade.

### DETAILED DESCRIPTION OF THE INVENTION

[0057] The present invention provides iRNA compositions which affect the RNA-induced silencing complex (RISC)-mediated cleavage of RNA transcripts of a coagulation Factor X (F10) gene. The gene may be within a cell, e.g., a cell within a subject, such as a human. The use of these iRNAs enables the targeted degradation of mRNAs of the corresponding gene (coagulation Factor X gene) in mammals.

[0058] The iRNAs of the invention have been designed to target the human coagulation Factor X gene, including portions of the gene that are conserved in the coagulation Factor X orthologs of other mammalian species. Without intending to be limited by theory, it is believed that a combination or sub-combination of the foregoing properties and the specific target sites or the specific modifications in these iRNAs confer to the iRNAs of the invention improved efficacy, stability, potency, durability, and safety.

[0059] Accordingly, the present invention provides methods for treating and preventing a coagulation Factor X-associated disorder, disease, or condition, e.g., a disorder, disease, or condition associated with thrombosis, e.g., venous thrombosis, e.g., deep vein thrombosis; genetic thrombophilia, e.g., prothrombin thrombophilia; plurpura fulminans; acquired thrombophilia, e.g., antiphospholipid syndrome and systemic lupus erythematosus; drug induced thrombophilia; arterial thrombosis, e.g., myocardial infarction and peripheral arterial disease; thromboembolic disease, e.g., pulmonary embolus embolic and ischemic stroke; atrial fibrillation; post-surgery deep vein thrombosis; cancer thrombosis or infectious disease thrombosis, using iRNA compositions which effect the RNA-induced silencing complex (RISC)-mediated cleavage of RNA transcripts of a coagulation Factor X gene.

[0060] The iRNAs of the invention include an RNA strand (the antisense strand) having a region which is up to about 30 nucleotides or less in length, e.g., 19-30, 19-29, 19-28, 19-27, 19-26, 19-25, 19-24, 19-23, 19-22, 19-21, 19-20, 20-30, 20-29, 20-28, 20-27, 20-26, 20-25, 20-24, 20-23, 20-22, 20-21, 21-30, 21-29, 21-28, 21-27, 21-26, 21-25, 21-24, 21-23, or 21-22 nucleotides in length, which region is substantially complementary to at least part of an mRNA transcript of a coagulation Factor X gene. In certain embodiments, the RNAi agents of the disclosure include an RNA strand (the antisense strand) having a region which is about 21-23 nucleotides in length, which region is substantially complementary to at least part of an mRNA transcript of a coagulation Factor X gene.

[0061] In certain embodiments, one or both of the strands of the double stranded RNAi agents of the invention is up to 66 nucleotides in length, e.g., 36-66, 26-36, 25-36, 31-60, 22-43, 27-53 nucleotides in length, with a region of at least 19 contiguous nucleotides that is substantially complementary to at least a part of an mRNA transcript of a coagulation Factor X gene. In some embodiments, such iRNA agents having longer length antisense strands preferably may include a second RNA strand (the sense strand) of 20-60 nucleotides in length wherein the sense and antisense strands form a duplex of 18-30 contiguous nucleotides.

[0062] The use of iRNAs of the invention enables the targeted degradation of mRNAs of the corresponding gene (coagulation Factor X gene) in mammals. Using in vitro and in vivo assays, the present inventors have demonstrated that iRNAs targeting a coagulation Factor X gene can potently mediate RNAi, resulting in significant inhibition of expression of a coagulation Factor X gene. Thus, methods and compositions including these iRNAs are useful for treating a subject having a coagulation Factor X-associated disorder, e.g., a disorder associated with thrombosis.

[0063] Accordingly, the present invention provides methods and combination therapies for treating a subject having a disorder that would benefit from inhibiting or reducing the expression of a coagulation Factor X gene, e.g., a coagulation Factor X-associated disease, e.g., a disorder associated with thrombosis, using iRNA compositions which effect the RNA-induced silencing complex (RISC)-mediated cleavage of RNA transcripts of an F10 gene.

[0064] The present invention also provides methods for preventing at least one symptom in a subject having a disorder that would benefit from inhibiting or reducing the expression of a coagulation Factor X gene, e.g., a disorder associated with thrombosis.

[0065] The following detailed description discloses how to make and use compositions containing iRNAs to inhibit the expression of a coagulation Factor X gene as well as compositions, uses, and methods for treating subjects that would benefit from inhibition or reduction of the expression of a coagulation Factor X gene, e.g., subjects susceptible to or diagnosed with a coagulation Factor X-associated disorder, e.g., a disorder associated with thrombosis.

### I. Definitions

[0066] In order that the present invention may be more readily understood, certain terms are first defined. In addition, it should be noted that whenever a value or range of values of a parameter are recited, it is intended that values and ranges intermediate to the recited values are also intended to be part of this invention.

[0067] The articles “a” and “an” are used herein to refer to one or to more than one (i.e., to at least one) of the grammatical object of the article. By way of example, “an element” means one element or more than one element, e.g., a plurality of elements.

[0068] The term “including” is used herein to mean, and is used interchangeably with, the phrase “including but not limited to”.

[0069] The term “or” is used herein to mean, and is used interchangeably with, the term “and/or,” unless context clearly indicates otherwise. For example, “sense strand or antisense strand” is understood as “sense strand or antisense strand or sense strand and antisense strand.”

[0070] The term “about” is used herein to mean within the typical ranges of tolerances in the art. For example, “about” can be understood as about 2 standard deviations from the mean. In certain embodiments, about means±10%. In certain embodiments, about means±5%. When about is present before a series of numbers or a range, it is understood that “about” can modify each of the numbers in the series or range.

[0071] The term “at least,” “no less than”, or “or more” prior to a number or series of numbers is understood to include the number adjacent to the term “at least”, and all subsequent numbers or integers that could logically be included, as clear from context. For example, the number of nucleotides in a nucleic acid molecule must be an integer. For example, “at least 19 nucleotides of a 21 nucleotide nucleic acid molecule” means that 19, 20, or 21 nucleotides have the indicated property.

[0072] When at least is present before a series of numbers or a range, it is understood that “at least” can modify each of the numbers in the series or range.

[0073] As used herein, “no more than” or “less than” is understood as the value adjacent to the phrase and logical lower values or integers, as logical from context, to zero. For example, a duplex with an overhang of “no more than 2 nucleotides” has a 2, 1, or 0 nucleotide overhang. When “no more than” is present before a series of numbers or a range, it is understood that “no more than” can modify each of the numbers in the series or range. As used herein, ranges include both the upper and lower limit.

[0074] As used herein, methods of detection can include determination that the amount of analyte present is below the level of detection of the method.

[0075] In the event of a conflict between an indicated target site and the nucleotide sequence for a sense or antisense strand, the indicated sequence takes precedence.

[0076] In the event of a conflict between a sequence and its indicated site on a transcript or other sequence, the nucleotide sequence recited in the specification takes precedence.

[0077] As used herein, the term “coagulation Factor X,” used interchangeably with the term “F10,” refers to the well-known gene and polypeptide, also known in the art as Stuart-Prower Factor; Prothrombinase, factor X, factor Xa, FX and FXA.

[0078] The F10 gene encodes an essential cofactor of the blood coagulation cascade. This factor undergoes multiple processing steps before its preproprotein is converted to a mature two-chain form by the excision of the tripeptide RKR. Two chains of the factor are held together by one or more disulfide bonds; the light chain contains two EGF-like domains, while the heavy chain contains the catalytic domain which is structurally homologous to those of the other hemostatic serine proteases. The mature factor is activated by the cleavage of the activation peptide by Factor IXa (in the intrinsic pathway), or by Factor VIIa (in the extrinsic pathway). The activated factor then converts prothrombin to thrombin in the presence of Factor Va, Ca⁺², and phospholipid during blood clotting.

[0079] The term “F10” includes human F10, the amino acid and nucleotide sequence of which may be found in, for example, GenBank Accession Nos. NM_000504.4 (SEQ ID NO: 1), NM_001312674.2 (SEQ ID NO: 2), and NM_001312675.2 (SEQ ID NO: 3); mouse F10, the amino acid and nucleotide sequence of which may be found in, for example, GenBank Accession Nos. NM_001242368.1 (SEQ ID NO:4) and NM_007972.4 (SEQ ID NO: 5); rat F10, the amino acid and nucleotide sequence of which may be found in, for example, GenBank Accession No. NM_017143.2 (SEQ ID NO: 6); and Macaca fascicularis F10, the amino acid and nucleotide sequence of which may be found in, for example, GenBank Accession Nos. XM_005586296.2 (SEQ ID NO: 7). Additional examples of F10 mRNA sequences are readily available using, e.g., GenBank, UniProt, OMIM, and the Macaca genome project web site.

[0080] Exemplary F10 nucleotide sequences may also be found in SEQ ID NOs: 1-7. SEQ ID NOs: 8-14 are the antisense sequences of SEQ ID NOs: 1-7, respectively.

[0081] The term “F10,” as used herein, also refers to naturally occurring DNA sequence variations of the F10 gene. The term “F10,” as used herein, also refers to single nucleotide polymorphisms in the F10 gene. Numerous sequence variations within the F10 gene have been identified and may be found at, for example, NCBI dbSNP and UniProt (see, e.g., www.ncbi.nlm.nih.gov/snp?LinkName=gene_snp&from_uid=2159 (which is incorporated herein by reference as of the date of filing this application) which provide a list of SNPs in human F10). In preferred embodiments, such naturally occurring variants are included within the scope of the F10 gene sequence.

[0082] Further information on F10 can be found, for example, at www.ncbi.nlm.nih.gov/gene/2159 (which is incorporated herein by reference as of the date of filing this application).

[0083] The entire contents of each of the foregoing GenBank Accession numbers and the Gene database numbers are incorporated herein by reference as of the date of filing this application.

[0084] As used herein, “target sequence” refers to a contiguous portion of the nucleotide sequence of an mRNA molecule formed during the transcription of a coagulation Factor X (F10) gene, including mRNA that is a product of RNA processing of a primary transcription product. The target portion of the sequence will be at least long enough to serve as a substrate for iRNA-directed cleavage at or near that portion of the nucleotide sequence of an mRNA molecule formed during the transcription of an F10 gene. In one embodiment, the target sequence is within the protein coding region of F10.

[0085] The target sequence may be from about 19-36 nucleotides in length, e.g., preferably about 19-30 nucleotides in length. For example, the target sequence can be about 19-30 nucleotides, 19-30, 19-29, 19-28, 19-27, 19-26, 19-25, 19-24, 19-23, 19-22, 19-21, 19-20, 20-30, 20-29, 20-28, 20-27, 20-26, 20-25, 20-24, 20-23, 20-22, 20-21, 21-30, 21-29, 21-28, 21-27, 21-26, 21-25, 21-24, 21-23, or 21-22 nucleotides in length. In some embodiments, the target sequence is about 19 to about 30 nucleotides in length. In other embodiments, the target sequence is about 19 to about 25 nucleotides in length. In still other embodiments, the target sequence is about 19 to about 23 nucleotides in length. In some embodiments, the target sequence is about 21 to about 23 nucleotides in length. Ranges and lengths intermediate to the above recited ranges and lengths are also contemplated to be part of the invention.

[0086] As used herein, the term “strand comprising a sequence” refers to an oligonucleotide comprising a chain of nucleotides that is described by the sequence referred to using the standard nucleotide nomenclature.

[0087] “G,” “C,” “A,” “T,” and “U” each generally stand for a nucleotide that contains guanine, cytosine, adenine, thymidine, and uracil as a base, respectively. However, it will be understood that the term “ribonucleotide” or “nucleotide” can also refer to a modified nucleotide, as further detailed below, or a surrogate replacement moiety (see, e.g., Table 1). The skilled person is well aware that guanine, cytosine, adenine, and uracil can be replaced by other moieties without substantially altering the base pairing properties of an oligonucleotide comprising a nucleotide bearing such replacement moiety. For example, without limitation, a nucleotide comprising inosine as its base can base pair with nucleotides containing adenine, cytosine, or uracil. Hence, nucleotides containing uracil, guanine, or adenine can be replaced in the nucleotide sequences of dsRNA featured in the invention by a nucleotide containing, for example, inosine. In another example, adenine and cytosine anywhere in the oligonucleotide can be replaced with guanine and uracil, respectively to form G-U Wobble base pairing with the target mRNA. Sequences containing such replacement moieties are suitable for the compositions and methods featured in the invention.

[0088] The terms “iRNA”, “RNAi agent,” “iRNA agent,”, “RNA interference agent” as used interchangeably herein, refer to an agent that contains RNA as that term is defined herein, and which mediates the targeted cleavage of an RNA transcript via an RNA-induced silencing complex (RISC) pathway. iRNA directs the sequence-specific degradation of mRNA through a process known as RNA interference (RNAi). The iRNA modulates, e.g., inhibits, the expression of a coagulation Factor X gene in a cell, e.g., a cell within a subject, such as a mammalian subject.

[0089] In one embodiment, an RNAi agent of the invention includes a single stranded RNA that interacts with a target RNA sequence, e.g., a coagulation Factor X target mRNA sequence, to direct the cleavage of the target RNA. Without wishing to be bound by theory it is believed that long double stranded RNA introduced into cells is broken down into siRNA by a Type III endonuclease known as Dicer (Sharp et al. (2001) Genes Dev. 15:485). Dicer, a ribonuclease-III-like enzyme, processes the dsRNA into 19-23 base pair short interfering RNAs with characteristic two base 3′ overhangs (Bernstein, et al., (2001) Nature 409:363). The siRNAs are then incorporated into an RNA-induced silencing complex (RISC) where one or more helicases unwind the siRNA duplex, enabling the complementary antisense strand to guide target recognition (Nykanen, et al., (2001) Cell 107:309). Upon binding to the appropriate target mRNA, one or more endonucleases within the RISC cleave the target to induce silencing (Elbashir, et al., (2001) Genes Dev. 15:188). Thus, in one aspect the invention relates to a single stranded RNA (siRNA) generated within a cell and which promotes the formation of a RISC complex to effect silencing of the target gene, i.e., a coagulation Factor X (F10) gene. Accordingly, the term “siRNA” is also used herein to refer to an iRNA as described above.

[0090] In certain embodiments, the RNAi agent may be a single-stranded siRNA (ssRNAi) that is introduced into a cell or organism to inhibit a target mRNA. Single-stranded RNAi agents bind to the RISC endonuclease, Argonaute 2, which then cleaves the target mRNA. The single-stranded siRNAs are generally 15-30 nucleotides and are chemically modified. The design and testing of single-stranded siRNAs are described in U.S. Pat. No. 8,101,348 and in Lima et al., (2012) Cell 150:883-894, the entire contents of each of which are hereby incorporated herein by reference. Any of the antisense nucleotide sequences described herein may be used as a single-stranded siRNA as described herein or as chemically modified by the methods described in Lima et al., (2012) Cell 150:883-894.

[0091] In certain embodiments, an “iRNA” for use in the compositions, uses, and methods of the invention is a double stranded RNA and is referred to herein as a “double stranded RNA agent,” “double stranded RNA (dsRNA) molecule,” “dsRNA agent,” or “dsRNA”. The term “dsRNA”, refers to a complex of ribonucleic acid molecules, having a duplex structure comprising two anti-parallel and substantially complementary nucleic acid strands, referred to as having “sense” and “antisense” orientations with respect to a target RNA, i.e., a coagulation Factor X (F10) gene. In some embodiments of the invention, a double stranded RNA (dsRNA) triggers the degradation of a target RNA, e.g., an mRNA, through a post-transcriptional gene-silencing mechanism referred to herein as RNA interference or RNAi.

[0092] As used herein, the term “modified nucleotide” refers to a nucleotide having, independently, a modified sugar moiety, a modified internucleotide linkage, or modified nucleobase, or any combination thereof. Thus, the term modified nucleotide encompasses substitutions, additions or removal of, e.g., a functional group or atom, to internucleoside linkages, sugar moieties, or nucleobases. The modifications suitable for use in the agents of the invention include all types of modifications disclosed herein or known in the art. Any such modifications, as used in a siRNA type molecule, are encompassed by “iRNA” or “RNAi agent” for the purposes of this specification and claims.

[0093] In certain embodiments of the instant disclosure, inclusion of a deoxy-nucleotide—which is acknowledged as a naturally occurring form of nucleotide—if present within a RNAi agent can be considered to constitute a modified nucleotide.

[0094] The duplex region may be of any length that permits specific degradation of a desired target RNA through a RISC pathway, and may range from about 19 to 36 base pairs in length, e.g., about 19-30 base pairs in length, for example, about 9, 10, 11, 12, 13, 14, 15, 16, 17, 18, 19, 20, 21, 22, 23, 24, 25, 26, 27, 28, 29, 30, 31, 32, 33, 34, 35, or 36 base pairs in length, such as about 19-30, 19-29, 19-28, 19-27, 19-26, 19-25, 19-24, 19-23, 19-22, 19-21, 19-20, 20-30, 20-29, 20-28, 20-27, 20-26, 20-25, 20-24, 20-23, 20-22, 20-21, 21-30, 21-29, 21-28, 21-27, 21-26, 21-25, 21-24, 21-23, or 21-22 base pairs in length. In certain embodiments, the duplex region is 19-21 base pairs in length, e.g., 21 base pairs in length. Ranges and lengths intermediate to the above recited ranges and lengths are also contemplated to be part of the disclosure.

[0095] The two strands forming the duplex structure may be different portions of one larger RNA molecule, or they may be separate RNA molecules. Where the two strands are part of one larger molecule, and therefore are connected by an uninterrupted chain of nucleotides between the 3′-end of one strand and the 5′-end of the respective other strand forming the duplex structure, the connecting RNA chain is referred to as a “hairpin loop.” A hairpin loop can comprise at least one unpaired nucleotide. In some embodiments, the hairpin loop can comprise at least 4, 5, 6, 7, 8, 9, 10, 20, 23 or more unpaired nucleotides. In some embodiments, the hairpin loop can be 10 or fewer nucleotides. In some embodiments, the hairpin loop can be 8 or fewer unpaired nucleotides. In some embodiments, the hairpin loop can be 4-10 unpaired nucleotides. In some embodiments, the hairpin loop can be 4-8 nucleotides.

[0096] In certain embodiment, the two strands of double-stranded oligomeric compound can be linked together. The two strands can be linked to each other at both ends, or at one end only. By linking at one end is meant that 5′-end of first strand is linked to the 3′-end of the second strand or 3′-end of first strand is linked to 5′-end of the second strand. When the two strands are linked to each other at both ends, 5′-end of first strand is linked to 3′-end of second strand and 3′-end of first strand is linked to 5′-end of second strand. The two strands can be linked together by an oligonucleotide linker including, but not limited to, (N)n; wherein N is independently a modified or unmodified nucleotide and n is 3-23. In some embodiments, n is 3-10, e.g., 3, 4, 5, 6, 7, 8, 9, or 10. In some embodiments, the oligonucleotide linker is selected from the group consisting of GNRA, (G)4, (U)4, and (dT)4, wherein N is a modified or unmodified nucleotide and R is a modified or unmodified purine nucleotide. Some of the nucleotides in the linker can be involved in base-pair interactions with other nucleotides in the linker. The two strands can also be linked together by a non-nucleosidic linker, e.g. a linker described herein. It will be appreciated by one of skill in the art that any oligonucleotide chemical modifications or variations describe herein can be used in the oligonucleotide linker.

[0097] Hairpin and dumbbell type oligomeric compounds will have a duplex region equal to or at least 14, 15, 15, 16, 17, 18, 19, 29, 21, 22, 23, 24, or 25 nucleotide pairs. The duplex region can be equal to or less than 200, 100, or 50, in length. In some embodiments, ranges for the duplex region are 15-30, 17 to 23, 19 to 23, and 19 to 21 nucleotides pairs in length.

[0098] The hairpin oligomeric compounds can have a single strand overhang or terminal unpaired region, in some embodiments at the 3′, and in some embodiments on the antisense side of the hairpin. In some embodiments, the overhangs are 1-4, more generally 2-3 nucleotides in length. The hairpin oligomeric compounds that can induce RNA interference are also referred to as “shRNA” herein.

[0099] Where the two substantially complementary strands of a dsRNA are comprised by separate RNA molecules, those molecules need not be, but can be covalently connected. Where the two strands are connected covalently by means other than an uninterrupted chain of nucleotides between the 3′-end of one strand and the 5′-end of the respective other strand forming the duplex structure, the connecting structure is referred to as a “linker.” The RNA strands may have the same or a different number of nucleotides. The maximum number of base pairs is the number of nucleotides in the shortest strand of the dsRNA minus any overhangs that are present in the duplex. In addition to the duplex structure, an RNAi may comprise one or more nucleotide overhangs. In one embodiment of the RNAi agent, at least one strand comprises a 3′ overhang of at least 1 nucleotide. In another embodiment, at least one strand comprises a 3′ overhang of at least 2 nucleotides, e.g., 2, 3, 4, 5, 6, 7, 9, 10, 11, 12, 13, 14, or 15 nucleotides. In other embodiments, at least one strand of the RNAi agent comprises a 5′ overhang of at least 1 nucleotide. In certain embodiments, at least one strand comprises a 5′ overhang of at least 2 nucleotides, e.g., 2, 3, 4, 5, 6, 7, 9, 10, 11, 12, 13, 14, or 15 nucleotides. In still other embodiments, both the 3′ and the 5′ end of one strand of the RNAi agent comprise an overhang of at least 1 nucleotide.

[0100] In certain embodiments, an iRNA agent of the invention is a dsRNA, each strand of which comprises 19-23 nucleotides, that interacts with a target RNA sequence, e.g., a coagulation Factor X (F10) gene, to direct cleavage of the target RNA.

[0101] In some embodiments, an iRNA of the invention is a dsRNA of 24-30 nucleotides that interacts with a target RNA sequence, e.g., an F10 target mRNA sequence, to direct the cleavage of the target RNA.

[0102] As used herein, the term “nucleotide overhang” refers to at least one unpaired nucleotide that protrudes from the duplex structure of a double stranded iRNA. For example, when a 3-end of one strand of a dsRNA extends beyond the 5-end of the other strand, or vice versa, there is a nucleotide overhang. A dsRNA can comprise an overhang of at least one nucleotide; alternatively, the overhang can comprise at least two nucleotides, at least three nucleotides, at least four nucleotides, at least five nucleotides or more. A nucleotide overhang can comprise or consist of a nucleotide/nucleoside analog, including a deoxynucleotide/nucleoside. The overhang(s) can be on the sense strand, the antisense strand, or any combination thereof. Furthermore, the nucleotide(s) of an overhang can be present on the 5-end, 3-end, or both ends of either an antisense or sense strand of a dsRNA.

[0103] In one embodiment of the dsRNA, at least one strand comprises a 3′ overhang of at least 1 nucleotide. In another embodiment, at least one strand comprises a 3′ overhang of at least 2 nucleotides, e.g., 2, 3, 4, 5, 6, 7, 9, 10, 11, 12, 13, 14, or 15 nucleotides. In other embodiments, at least one strand of the RNAi agent comprises a 5′ overhang of at least 1 nucleotide. In certain embodiments, at least one strand comprises a 5′ overhang of at least 2 nucleotides, e.g., 2, 3, 4, 5, 6, 7, 9, 10, 11, 12, 13, 14, or 15 nucleotides. In still other embodiments, both the 3′ and the 5′ end of one strand of the RNAi agent comprise an overhang of at least 1 nucleotide.

[0104] In one embodiment, the antisense strand of a dsRNA has a 1-10 nucleotide, e.g., a 1, 2, 3, 4, 5, 6, 7, 8, 9, or 10 nucleotide, overhang at the 3′-end or the 5′-end. In one embodiment, the sense strand of a dsRNA has a 1-10 nucleotide, e.g., a 1, 2, 3, 4, 5, 6, 7, 8, 9, or 10 nucleotide, overhang at the 3′-end or the 5′-end. In another embodiment, one or more of the nucleotides in the overhang is replaced with a nucleoside thiophosphate.

[0105] In certain embodiments, the antisense strand of a dsRNA has a 1-10 nucleotide, e.g., a 1, 2, 3, 4, 5, 6, 7, 8, 9, or 10 nucleotide, overhang at the 3′-end or the 5′-end. In certain embodiments, the overhang on the sense strand or the antisense strand, or both, can include extended lengths longer than 10 nucleotides, e.g., 1-30 nucleotides, 2-30 nucleotides, 10-30 nucleotides, 10-25 nucleotides, 10-20 nucleotides, or 10-15 nucleotides in length. In certain embodiments, an extended overhang is on the sense strand of the duplex. In certain embodiments, an extended overhang is present on the 3′ end of the sense strand of the duplex. In certain embodiments, an extended overhang is present on the 5′ end of the sense strand of the duplex. In certain embodiments, an extended overhang is on the antisense strand of the duplex. In certain embodiments, an extended overhang is present on the 3′end of the antisense strand of the duplex. In certain embodiments, an extended overhang is present on the 5′end of the antisense strand of the duplex. In certain embodiments, one or more of the nucleotides in the extended overhang is replaced with a nucleoside thiophosphate. In certain embodiments, the overhang includes a self-complementary portion such that the overhang is capable of forming a hairpin structure that is stable under physiological conditions.

[0106] “Blunt” or “blunt end” means that there are no unpaired nucleotides at that end of the double stranded RNA agent, i.e., no nucleotide overhang. A “blunt ended” double stranded RNA agent is double stranded over its entire length, i.e., no nucleotide overhang at either end of the molecule. The RNAi agents of the invention include RNAi agents with no nucleotide overhang at one end (i.e., agents with one overhang and one blunt end) or with no nucleotide overhangs at either end. Most often such a molecule will be double-stranded over its entire length.

[0107] The term “antisense strand” or “guide strand” refers to the strand of an iRNA, e.g., a dsRNA, which includes a region that is substantially complementary to a target sequence, e.g., an F10 mRNA.

[0108] As used herein, the term “region of complementarity” refers to the region on the antisense strand that is substantially complementary to a sequence, for example a target sequence, e.g., a coagulation Factor X nucleotide sequence, as defined herein. Where the region of complementarity is not fully complementary to the target sequence, the mismatches can be in the internal or terminal regions of the molecule. Generally, the most tolerated mismatches are in the terminal regions, e.g., within 5, 4, or 3 nucleotides of the 5′- or 3′-end of the iRNA. In some embodiments, a double stranded RNA agent of the invention includes a nucleotide mismatch in the antisense strand. In some embodiments, the antisense strand of the double stranded RNA agent of the invention includes no more than 4 mismatches with the target mRNA, e.g., the antisense strand includes 4, 3, 2, 1, or 0 mismatches with the target mRNA. In some embodiments, the antisense strand double stranded RNA agent of the invention includes no more than 4 mismatches with the sense strand, e.g., the antisense strand includes 4, 3, 2, 1, or 0 mismatches with the sense strand. In some embodiments, a double stranded RNA agent of the invention includes a nucleotide mismatch in the sense strand. In some embodiments, the sense strand of the double stranded RNA agent of the invention includes no more than 4 mismatches with the antisense strand, e.g., the sense strand includes 4, 3, 2, 1, or 0 mismatches with the antisense strand. In some embodiments, the nucleotide mismatch is, for example, within 5, 4, 3 nucleotides from the 3′-end of the iRNA. In another embodiment, the nucleotide mismatch is, for example, in the 3′-terminal nucleotide of the iRNA agent. In some embodiments, the mismatch(s) is not in the seed region.

[0109] Thus, an RNAi agent as described herein can contain one or more mismatches to the target sequence. In one embodiment, a RNAi agent as described herein contains no more than 3 mismatches (i.e., 3, 2, 1, or 0 mismatches). In one embodiment, an RNAi agent as described herein contains no more than 2 mismatches. In one embodiment, an RNAi agent as described herein contains no more than 1 mismatch. In one embodiment, an RNAi agent as described herein contains 0 mismatches. In certain embodiments, if the antisense strand of the RNAi agent contains mismatches to the target sequence, the mismatch can optionally be restricted to be within the last 5 nucleotides from either the 5′- or 3′-end of the region of complementarity. For example, in such embodiments, for a 23 nucleotide RNAi agent, the strand which is complementary to a region of an F10 gene, generally does not contain any mismatch within the central 13 nucleotides. The methods described herein or methods known in the art can be used to determine whether an RNAi agent containing a mismatch to a target sequence is effective in inhibiting the expression of an F10 gene. Consideration of the efficacy of RNAi agents with mismatches in inhibiting expression of an F10 gene is important, especially if the particular region of complementarity in an F10 gene is known to have polymorphic sequence variation within the population.

[0110] The term “sense strand” or “passenger strand” as used herein, refers to the strand of an iRNA that includes a region that is substantially complementary to a region of the antisense strand as that term is defined herein.

[0111] As used herein, “substantially all of the nucleotides are modified” is intended to include dsRNA agents of the invention in which the sense and/or antisense strands are largely but not wholly modified and can include not more than 5, 4, 3, 2, or 1 unmodified nucleotides.

[0112] As used herein, the term “cleavage region” refers to a region that is located immediately adjacent to the cleavage site. The cleavage site is the site on the target at which cleavage occurs. In some embodiments, the cleavage region comprises three bases on either end of, and immediately adjacent to, the cleavage site. In some embodiments, the cleavage region comprises two bases on either end of, and immediately adjacent to, the cleavage site. In some embodiments, the cleavage site specifically occurs at the site bound by nucleotides 10 and 11 of the antisense strand, and the cleavage region comprises nucleotides 11, 12 and 13.

[0113] As used herein, and unless otherwise indicated, the term “complementary,” when used to describe a first nucleotide sequence in relation to a second nucleotide sequence, refers to the ability of an oligonucleotide or polynucleotide comprising the first nucleotide sequence to hybridize and form a duplex structure under certain conditions with an oligonucleotide or polynucleotide comprising the second nucleotide sequence, as will be understood by the skilled person. Such conditions can be, for example, “stringent conditions”, where stringent conditions can include: 400 mM NaCl, 40 mM PIPES pH 6.4, 1 mM EDTA, 50° C. or 70° C. for 12-16 hours followed by washing (see, e.g., “Molecular Cloning: A Laboratory Manual, Sambrook, et al. (1989) Cold Spring Harbor Laboratory Press). Other conditions, such as physiologically relevant conditions as can be encountered inside an organism, can apply. The skilled person will be able to determine the set of conditions most appropriate for a test of complementarity of two sequences in accordance with the ultimate application of the hybridized nucleotides.

[0114] Complementary sequences within an iRNA, e.g., within a dsRNA as described herein, include base-pairing of the oligonucleotide or polynucleotide comprising a first nucleotide sequence to an oligonucleotide or polynucleotide comprising a second nucleotide sequence over the entire length of one or both nucleotide sequences. Such sequences can be referred to as “fully complementary” with respect to each other herein. However, where a first sequence is referred to as “substantially complementary” with respect to a second sequence herein, the two sequences can be fully complementary, or they can form one or more, but generally not more than 5, 4, 3, or 2 mismatched base pairs upon hybridization for a duplex up to 30 base pairs, while retaining the ability to hybridize under the conditions most relevant to their ultimate application, e.g., inhibition of gene expression in vitro or in vivo. However, where two oligonucleotides are designed to form, upon hybridization, one or more single stranded overhangs, such overhangs shall not be regarded as mismatches with regard to the determination of complementarity. For example, a dsRNA comprising one oligonucleotide 21 nucleotides in length and another oligonucleotide 23 nucleotides in length, wherein the longer oligonucleotide comprises a sequence of 21 nucleotides that is fully complementary to the shorter oligonucleotide, can yet be referred to as “fully complementary” for the purposes described herein.

[0115] “Complementary” sequences, as used herein, can also include, or be formed entirely from, non-Watson-Crick base pairs or base pairs formed from non-natural and modified nucleotides, in so far as the above requirements with respect to their ability to hybridize are fulfilled. Such non-Watson-Crick base pairs include, but are not limited to, G:U Wobble or Hoogsteen base pairing.

[0116] The terms “complementary,” “fully complementary” and “substantially complementary” herein can be used with respect to the base matching between two oligonucleotides or polynucleotides, such as the sense strand and the antisense strand of a dsRNA, or between the antisense strand of a double stranded RNA agent and a target sequence, as will be understood from the context of their use.

[0117] As used herein, a polynucleotide that is “substantially complementary to at least part of” a messenger RNA (mRNA) refers to a polynucleotide that is substantially complementary to a contiguous portion of the mRNA of interest (e.g., an mRNA encoding a coagulation Factor X gene). For example, a polynucleotide is complementary to at least a part of a coagulation Factor X mRNA if the sequence is substantially complementary to a non-interrupted portion of an mRNA encoding a coagulation Factor X gene.

[0118] Accordingly, in some embodiments, the antisense polynucleotides disclosed herein are fully complementary to the target F10 sequence.

[0119] In other embodiments, the antisense polynucleotides disclosed herein are substantially complementary to the target F10 sequence and comprise a contiguous nucleotide sequence which is at least 80% complementary over its entire length to the equivalent region of the nucleotide sequence of any one of SEQ ID NOs:1-7, or a fragment of any one of SEQ ID NOs:1-7, such as about 85%, about 90%, about 91%, about 92%, about 93%, about 94%, about 95%, about 96%, about 97%, about 98%, or about 99% complementary.

[0120] In other embodiments, the antisense polynucleotides disclosed herein are substantially complementary to the target F10 sequence and comprise a contiguous nucleotide sequence which is at least about 80% complementary over its entire length to any one of the sense strand nucleotide sequences in any one of any one of Tables 2-3, or a fragment of any one of the sense strand nucleotide sequences in any one of Tables 2-3, such as about 85%, about 90%, about 95%, or fully complementary.

[0121] In one embodiment, an RNAi agent of the disclosure includes a sense strand that is substantially complementary to an antisense polynucleotide which, in turn, is the same as a target F10 sequence, and wherein the sense strand polynucleotide comprises a contiguous nucleotide sequence which is at least about 80% complementary over its entire length to the equivalent region of the nucleotide sequence of SEQ ID NOs: 8-14, or a fragment of any one of SEQ ID NOs: 8-14, such as about 85%, about 90%, about 95%, or fully complementary.

[0122] In some embodiments, an iRNA of the invention includes a sense strand that is substantially complementary to an antisense polynucleotide which, in turn, is complementary to a target coagulation Factor X sequence, and wherein the sense strand polynucleotide comprises a contiguous nucleotide sequence which is at least about 80% complementary over its entire length to any one of the antisense strand nucleotide sequences in any one of any one of Tables 2-3, or a fragment of any one of the antisense strand nucleotide sequences in any one of Tables 2-3, such as about 85%, about 90%, about 95%, or fully complementary

[0123] In some embodiments, the double-stranded region of a double-stranded iRNA agent is equal to or at least, 17, 18, 19, 20, 21, 22, 23, 23, 24, 25, 26, 27, 28, 29, 30 or more nucleotide pairs in length.

[0124] In some embodiments, the antisense strand of a double-stranded iRNA agent is equal to or at least 17, 18, 19, 20, 21, 22, 23, 23, 24, 25, 26, 27, 28, 29, or 30 nucleotides in length.

[0125] In some embodiments, the sense strand of a double-stranded iRNA agent is equal to or at least 17, 18, 19, 20, 21, 22, 23, 23, 24, 25, 26, 27, 28, 29, or 30 nucleotides in length.

[0126] In one embodiment, the sense and antisense strands of the double-stranded iRNA agent are each 18 to 30 nucleotides in length.

[0127] In one embodiment, the sense and antisense strands of the double-stranded iRNA agent are each 19 to 25 nucleotides in length.

[0128] In one embodiment, the sense and antisense strands of the double-stranded iRNA agent are each 21 to 23 nucleotides in length.

[0129] In one embodiment, the sense strand of the iRNA agent is 21-nucleotides in length, and the antisense strand is 23-nucleotides in length, wherein the strands form a double-stranded region of 21 consecutive base pairs having a 2-nucleotide long single stranded overhangs at the 3-end.

[0130] In some embodiments, the majority of nucleotides of each strand are ribonucleotides, but as described in detail herein, each or both strands can also include one or more non-ribonucleotides, e.g., a deoxyribonucleotide or a modified nucleotide. In addition, an “iRNA” may include ribonucleotides with chemical modifications. Such modifications may include all types of modifications disclosed herein or known in the art. Any such modifications, as used in an iRNA molecule, are encompassed by “iRNA” for the purposes of this specification and claims.

[0131] In certain embodiments of the instant disclosure, inclusion of a deoxy-nucleotide if present within an RNAi agent can be considered to constitute a modified nucleotide.

[0132] In one embodiment, at least partial suppression of the expression of an F10 gene, is assessed by a reduction of the amount of F10 mRNA which can be isolated from or detected in a first cell or group of cells in which an F10 gene is transcribed and which has or have been treated such that the expression of an F10 gene is inhibited, as compared to a second cell or group of cells substantially identical to the first cell or group of cells but which has or have not been so treated (control cells). The degree of inhibition may be expressed in terms of:

$$\\ \frac{( mRNA in control cells ) - ( mRNA in treated cells )}{( mRNA in control cells )} \cdot 100 \%$$

[0133] The phrase “contacting a cell with an iRNA,” such as a dsRNA, as used herein, includes contacting a cell by any possible means. Contacting a cell with an iRNA includes contacting a cell in vitro with the iRNA or contacting a cell in vivo with the iRNA. The contacting may be done directly or indirectly. Thus, for example, the iRNA may be put into physical contact with the cell by the individual performing the method, or alternatively, the iRNA may be put into a situation that will permit or cause it to subsequently come into contact with the cell.

[0134] Contacting a cell in vitro may be done, for example, by incubating the cell with the iRNA. Contacting a cell in vivo may be done, for example, by injecting the iRNA into or near the tissue where the cell is located, or by injecting the iRNA into another area, e.g., the bloodstream or the subcutaneous space, such that the agent will subsequently reach the tissue where the cell to be contacted is located. For example, the iRNA may contain or be coupled to a ligand, e.g., GalNAc, that directs the iRNA to a site of interest, e.g., the liver. Combinations of in vitro and in vivo methods of contacting are also possible. For example, a cell may also be contacted in vitro with an iRNA and subsequently transplanted into a subject.

[0135] In certain embodiments, contacting a cell with an iRNA includes “introducing” or “delivering the iRNA into the cell” by facilitating or effecting uptake or absorption into the cell. Absorption or uptake of an iRNA can occur through unaided diffusion or active cellular processes, or by auxiliary agents or devices. Introducing an iRNA into a cell may be in vitro or in vivo. For example, for in vivo introduction, iRNA can be injected into a tissue site or administered systemically. In vitro introduction into a cell includes methods known in the art such as electroporation and lipofection. Further approaches are described herein below or are known in the art.

[0136] The term “lipid nanoparticle” or “LNP” is a vesicle comprising a lipid layer encapsulating a pharmaceutically active molecule, such as a nucleic acid molecule, e.g., an iRNA or a plasmid from which an iRNA is transcribed. LNPs are described in, for example, U.S. Pat. Nos. 6,858,225, 6,815,432, 8,158,601, and 8,058,069, the entire contents of which are hereby incorporated herein by reference.

[0137] As used herein, a “subject” is an animal, such as a mammal, including a primate (such as a human, a non-human primate, e.g., a monkey, and a chimpanzee), a non-primate (such as a rabbit, a sheep, a hamster, a guinea pig, a dog, a rat, or a mouse), or a bird that expresses the target gene, either endogenously or heterologously. In an embodiment, the subject is a human, such as a human being treated or assessed for a disease or disorder that would benefit from reduction in F10 expression; a human at risk for a disease or disorder that would benefit from reduction in F10 expression; a human having a disease or disorder that would benefit from reduction in F10 expression; or human being treated for a disease or disorder that would benefit from reduction in F10 expression as described herein. In some embodiments, the subject is a female human. In other embodiments, the subject is a male human. In one embodiment, the subject is an adult subject. In another embodiment, the subject is a pediatric subject.

[0138] As used herein, the terms “treating” or “treatment” refer to a beneficial or desired result, such as reducing at least one sign or symptom of an F10-associated disorder in a subject. Treatment also includes a reduction of one or more sign or symptoms associated with unwanted F10 expression; diminishing the extent of unwanted F10 activation or stabilization; amelioration or palliation of unwanted F10 activation or stabilization. “Treatment” can also mean prolonging survival as compared to expected survival in the absence of treatment. In certain embodiments, the F10-associated disease or disorder is a disease or disorder associated with thrombosis. Non-limiting examples of disorders or diseases associated with thrombosis include venous thrombosis, e.g., deep vein thrombosis; genetic thrombophilia, e.g., prothrombin thrombophilia; plurpura fulminans; acquired thrombophilia, e.g., antiphospholipid syndrome and systemic lupus erythematosus; drug induced thrombophilia; arterial thrombosis, e.g., myocardial infarction and peripheral arterial disease; thromboembolic disease, e.g., pulmonary embolus embolic and ischemic stroke; atrial fibrillation; post-surgery deep vein thrombosis; cancer thrombosis or infectious disease thrombosis.

[0139] The term “lower” in the context of the level of F10 in a subject or a disease marker or symptom refers to a statistically significant decrease in such level. The decrease can be, for example, at least 10%, 15%, 20%, 25%, 30%, %, 40%, 45%, 50%, 55%, 60%, 65%, 70%, 75%, 80%, 85%, 90%, 95%, or more. In certain embodiments, a decrease is at least 20%. In certain embodiments, the decrease is at least 50% in a disease marker, e.g., protein or gene expression level. “Lower” in the context of the level of F10 in a subject is preferably down to a level accepted as within the range of normal for an individual without such disorder. In certain embodiments, the expression of the target is normalized, i.e., decreased towards or to a level accepted as within the range of normal for an individual without such disorder. As used here, “lower” in a subject can refer to lowerng of gene expression or protein production in a cell in a subject does not require lowering of expression in all cells or tissues of a subject. For example, as used herein, lowering in a subject can include lowering of gene expression or protein production in the liver of a subject.

[0140] The term “lower” can also be used in association with normalizing a symptom of a disease or condition, i.e. decreasing the difference between a level in a subject suffering from an F10-associated disease towards or to a level in a normal subject not suffering from an F10-associated disease.

[0141] As used herein, if a disease is associated with an elevated value for a symptom, “normal” is considered to be the upper limit of normal. If a disease is associated with a decreased value for a symptom, “normal” is considered to be the lower limit of normal.

[0142] As used herein, “prevention” or “preventing,” when used in reference to a disease, disorder or condition thereof, that would benefit from a reduction in expression of an F10 gene or production of F10 protein, refers to preventing a subject who has at least one sign or symptom of a disease from developing further signs and symtoms thereby meeting the diagnostic criteria for that disease. In certain embodiments, prevention includes delayed progression to meeting the diagnostic criteria of the disease by days, weeks, months or years as compared to what would be predicted by natural history studies or the typical progression of the disease.

[0143] As used herein, the terms “coagulation Factor X-associated disease” or “F10-associated disease,” include a disease, disorder or condition that would benefit from a decrease in F10 gene expression, replication, or protein activity. Such disorders are caused by, or associated with excessive blood clotting. In some embodiments, the F10-associated disease or disorder is a disease or disorder associated with thrombosis. Non-limiting examples of disorders or diseases associated with thrombosis include venous thrombosis, e.g., deep vein thrombosis; genetic thrombophilia, e.g., prothrombin thrombophilia; plurpura fulminans; acquired thrombophilia, e.g., antiphospholipid syndrome and systemic lupus erythematosus; drug induced thrombophilia; arterial thrombosis, e.g., myocardial infarction and peripheral arterial disease; thromboembolic disease, e.g., pulmonary embolus embolic and ischemic stroke; atrial fibrillation; post-surgery deep vein thrombosis; cancer thrombosis or infectious disease thrombosis.

[0144] “Therapeutically effective amount,” as used herein, is intended to include the amount of an RNAi agent that, when administered to a subject having an F10-associated disease, is sufficient to effect treatment of the disease (e.g., by diminishing, ameliorating, or maintaining the existing disease or one or more symptoms of disease). The “therapeutically effective amount” may vary depending on the RNAi agent, how the agent is administered, the disease and its severity and the history, age, weight, family history, genetic makeup, the types of preceding or concomitant treatments, if any, and other individual characteristics of the subject to be treated.

[0145] “Prophylactically effective amount,” as used herein, is intended to include the amount of an RNAi agent that, when administered to a subject having at least one sign or symptom of an F10-associated disorder, is sufficient to prevent or delay the subject's progression to meeting the full diagnostic criteria of the disease. Prevention of the disease includes slowing the course of progression to full blown disease. The “prophylactically effective amount” may vary depending on the RNAi agent, how the agent is administered, the degree of risk of disease, and the history, age, weight, family history, genetic makeup, the types of preceding or concomitant treatments, if any, and other individual characteristics of the patient to be treated.

[0146] A “therapeutically-effective amount” or “prophylactically effective amount” also includes an amount of an RNAi agent that produces some desired effect at a reasonable benefit/risk ratio applicable to any treatment. The iRNA employed in the methods of the present invention may be administered in a sufficient amount to produce a reasonable benefit/risk ratio applicable to such treatment.

[0147] The phrase “pharmaceutically acceptable” is employed herein to refer to those compounds, materials, compositions, or dosage forms which are, within the scope of sound medical judgment, suitable for use in contact with the tissues of human subjects and animal subjects without excessive toxicity, irritation, allergic response, or other problem or complication, commensurate with a reasonable benefit/risk ratio.

[0148] The phrase “pharmaceutically-acceptable carrier” as used herein means a pharmaceutically-acceptable material, composition, or vehicle, such as a liquid or solid filler, diluent, excipient, manufacturing aid (e.g., lubricant, talc magnesium, calcium or zinc stearate, or steric acid), or solvent encapsulating material, involved in carrying or transporting the subject compound from one organ, or portion of the body, to another organ, or portion of the body. Each carrier must be “acceptable” in the sense of being compatible with the other ingredients of the formulation and not injurious to the subject being treated. Such carriers are known in the art. Pharmaceutically acceptable carriers include carriers for administration by injection.

[0149] The term “sample,” as used herein, includes a collection of similar fluids, cells, or tissues isolated from a subject, as well as fluids, cells, or tissues present within a subject. Examples of biological fluids include blood, serum and serosal fluids, plasma, cerebrospinal fluid, ocular fluids, lymph, urine, saliva, and the like. Tissue samples may include samples from tissues, organs, or localized regions. For example, samples may be derived from particular organs, parts of organs, or fluids or cells within those organs. In certain embodiments, samples may be derived from the liver (e.g., whole liver or certain segments of liver or certain types of cells in the liver, such as, e.g., hepatocytes). In some embodiments, a “sample derived from a subject” refers to urine obtained from the subject. A “sample derived from a subject” can refer to blood or blood derived serum or plasma from the subject.

### II. iRNAs of the Invention

[0150] The present invention provides iRNAs which inhibit the expression of a coagulation Factor X gene. In preferred embodiments, the iRNA includes double stranded ribonucleic acid (dsRNA) molecules for inhibiting the expression of an F10 gene in a cell, such as a cell within a subject, e.g., a mammal, such as a human susceptible to developing a coagulation Factor X-associated disorder. The dsRNAi agent includes an antisense strand having a region of complementarity which is complementary to at least a part of an mRNA formed in the expression of an F10 gene. The region of complementarity is about 19-30 nucleotides in length (e.g., about 30, 29, 28, 27, 26, 25, 24, 23, 22, 21, 20, or 19 nucleotides in length). Upon contact with a cell expressing the F10 gene, the iRNA inhibits the expression of the F10 gene (e.g., a human, a primate, a non-primate, or a rat F10 gene) by at least about 50% as assayed by, for example, a PCR or branched DNA (bDNA)-based method, or by a protein-based method, such as by immunofluorescence analysis, using, for example, western blotting or flow cytometric techniques. In some embodiments, inhibition of expression is determined by the qPCR method provided in the examples herein with the siRNA at, e.g., a 10 nM concentration, in an appropriate organism cell or cell line provided therein. In some embodiments, inhibition of expression in vivo is determined by knockdown of the human gene in a rodent expressing the human gene, e.g., a mouse or an AAV-infected mouse expressing the human target gene, e.g., when administered as single dose, e.g., at 3 mg/kg at the nadir of RNA expression.

[0151] A dsRNA includes two RNA strands that are complementary and hybridize to form a duplex structure under conditions in which the dsRNA will be used. One strand of a dsRNA (the antisense strand) includes a region of complementarity that is substantially complementary, and generally fully complementary, to a target sequence. The target sequence can be derived from the sequence of an mRNA formed during the expression of an F10 gene. The other strand (the sense strand) includes a region that is complementary to the antisense strand, such that the two strands hybridize and form a duplex structure when combined under suitable conditions. As described elsewhere herein and as known in the art, the complementary sequences of a dsRNA can also be contained as self-complementary regions of a single nucleic acid molecule, as opposed to being on separate oligonucleotides.

[0152] Generally, the duplex structure is 15 to 30 base pairs in length, e.g., 15-29, 15-28, 15-27, 15-26, 15-25, 15-24, 15-23, 15-22, 15-21, 15-20, 15-19, 15-18, 15-17, 18-30, 18-29, 18-28, 18-27, 18-26, 18-25, 18-24, 18-23, 18-22, 18-21, 18-20, 19-30, 19-29, 19-28, 19-27, 19-26, 19-25, 19-24, 19-23, 19-22, 19-21, 19-20, 20-30, 20-29, 20-28, 20-27, 20-26, 20-25, 20-24, 20-23, 20-22, 20-21, 21-30, 21-29, 21-28, 21-27, 21-26, 21-25, 21-24, 21-23, or 21-22 base pairs in length. In certain preferred embodiments, the duplex structure is 18 to 25 base pairs in length, e.g., 18-25, 18-24, 18-23, 18-22, 18-21, 18-20, 19-25, 19-24, 19-23, 19-22, 19-21, 19-20, 20-25, 20-24, 20-23, 20-22, 20-21, 21-25, 21-24, 21-23, 21-22, 22-25, 22-24, 22-23, 23-25, 23-24 or 24-25 base pairs in length, for example, 19-21 basepairs in length. Ranges and lengths intermediate to the above recited ranges and lengths are also contemplated to be part of the disclosure.

[0153] Similarly, the region of complementarity to the target sequence is 15 to 30 nucleotides in length, e.g., 15-29, 15-28, 15-27, 15-26, 15-25, 15-24, 15-23, 15-22, 15-21, 15-20, 15-19, 15-18, 15-17, 18-30, 18-29, 18-28, 18-27, 18-26, 18-25, 18-24, 18-23, 18-22, 18-21, 18-20, 19-30, 19-29, 19-28, 19-27, 19-26, 19-25, 19-24, 19-23, 19-22, 19-21, 19-20, 20-30, 20-29, 20-28, 20-27, 20-26, 20-25, 20-24,20-23, 20-22, 20-21, 21-30, 21-29, 21-28, 21-27, 21-26, 21-25, 21-24, 21-23, or 21-22 nucleotides in length, for example 19-23 nucleotides in length or 21-23 nucleotides in length. Ranges and lengths intermediate to the above recited ranges and lengths are also contemplated to be part of the disclosure.

[0154] In some embodiments, the duplex structure is 19 to 30 base pairs in length. Similarly, the region of complementarity to the target sequence is 19 to 30 nucleotides in length.

[0155] In some embodiments, the dsRNA is about 19 to about 23 nucleotides in length, or about 25 to about 30 nucleotides in length. In general, the dsRNA is long enough to serve as a substrate for the Dicer enzyme. For example, it is well-known in the art that dsRNAs longer than about 21-23 nucleotides in length may serve as substrates for Dicer. As the ordinarily skilled person will also recognize, the region of an RNA targeted for cleavage will most often be part of a larger RNA molecule, often an mRNA molecule. Where relevant, a “part” of an mRNA target is a contiguous sequence of an mRNA target of sufficient length to allow it to be a substrate for RNAi-directed cleavage (i.e., cleavage through a RISC pathway).

[0156] One of skill in the art will also recognize that the duplex region is a primary functional portion of a dsRNA, e.g., a duplex region of about 19 to about 30 base pairs, e.g., about 19-30, 19-29, 19-28, 19-27, 19-26, 19-25, 19-24, 19-23, 19-22, 19-21, 19-20, 20-30, 20-29, 20-28, 20-27, 20-26, 20-25, 20-24, 20-23, 20-22, 20-21, 21-30, 21-29, 21-28, 21-27, 21-26, 21-25, 21-24, 21-23, or 21-22 base pairs. Thus, in one embodiment, to the extent that it becomes processed to a functional duplex, of e.g., 15-30 base pairs, that targets a desired RNA for cleavage, an RNA molecule or complex of RNA molecules having a duplex region greater than 30 base pairs is a dsRNA. Thus, an ordinarily skilled artisan will recognize that in one embodiment, a miRNA is a dsRNA. In another embodiment, a dsRNA is not a naturally occurring miRNA. In another embodiment, an iRNA agent useful to target coagulation Factor X gene expression is not generated in the target cell by cleavage of a larger dsRNA.

[0157] A dsRNA as described herein can further include one or more single-stranded nucleotide overhangs e.g., 1-4, 2-4, 1-3, 2-3, 1, 2, 3, or 4 nucleotides. dsRNAs having at least one nucleotide overhang can have superior inhibitory properties relative to their blunt-ended counterparts. A nucleotide overhang can comprise or consist of a nucleotide/nucleoside analog, including a deoxynucleotide/nucleoside. The overhang(s) can be on the sense strand, the antisense strand, or any combination thereof. Furthermore, the nucleotide(s) of an overhang can be present on the 5′-end, 3′-end, or both ends of an antisense or sense strand of a dsRNA.

[0158] A dsRNA can be synthesized by standard methods known in the art. Double stranded RNAi compounds of the invention may be prepared using a two-step procedure. First, the individual strands of the double stranded RNA molecule are prepared separately. Then, the component strands are annealed. The individual strands of the siRNA compound can be prepared using solution-phase or solid-phase organic synthesis or both. Organic synthesis offers the advantage that the oligonucleotide strands comprising unnatural or modified nucleotides can be easily prepared. Similarly, single-stranded oligonucleotides of the invention can be prepared using solution-phase or solid-phase organic synthesis or both.

[0159] Regardless of the method of synthesis, the siRNA preparation can be prepared in a solution (e.g., an aqueous or organic solution) that is appropriate for formulation. For example, the siRNA preparation can be precipitated and redissolved in pure double-distilled water, and lyophilized. The dried siRNA can then be resuspended in a solution appropriate for the intended formulation process.

[0160] In an aspect, a dsRNA of the invention includes at least two nucleotide sequences, a sense sequence and an anti-sense sequence. The sense strand is selected from the group of sequences provided in any one of Tables 2-3, and the corresponding antisense strand of the sense strand is selected from the group of sequences of any one of Tables 2-3. In this aspect, one of the two sequences is complementary to the other of the two sequences, with one of the sequences being substantially complementary to a sequence of an mRNA generated in the expression of a coagulation Factor X gene. As such, in this aspect, a dsRNA will include two oligonucleotides, where one oligonucleotide is described as the sense strand in any one of Tables 2-3, and the second oligonucleotide is described as the corresponding antisense strand of the sense strand in any one of Tables 2-3.

[0161] In certain embodiments, the substantially complementary sequences of the dsRNA are contained on separate oligonucleotides. In other embodiments, the substantially complementary sequences of the dsRNA are contained on a single oligonucleotide.

[0162] It will be understood that, although the sequences in Table 2 are not described as modified or conjugated sequences, the RNA of the iRNA of the invention e.g., a dsRNA of the invention, may comprise any one of the sequences set forth in any one of Tables 2-3 that is un-modified, un-conjugated, or modified or conjugated differently than described therein. In other words, the invention encompasses dsRNA of Tables 2-3 which are un-modified, un-conjugated, modified, or conjugated, as described herein.

[0163] The skilled person is well aware that dsRNAs having a duplex structure of about 20 to 23 base pairs, e.g., 21, base pairs have been hailed as particularly effective in inducing RNA interference (Elbashir et al., EMBO 2001, 20:6877-6888). However, others have found that shorter or longer RNA duplex structures can also be effective (Chu and Rana (2007) RNA 14:1714-1719; Kim et al. (2005) Nat Biotech 23:222-226). In the embodiments described above, by virtue of the nature of the oligonucleotide sequences provided in any one of Tables 2-3, dsRNAs described herein can include at least one strand of a length of minimally 21 nucleotides. It can be reasonably expected that shorter duplexes having any one of the sequences in any one of Tables 2-3 minus only a few nucleotides on one or both ends can be similarly effective as compared to the dsRNAs described above. Hence, dsRNAs having a sequence of at least 19, 20, or more contiguous nucleotides derived from any one of the sequences of any one of Tables 2-3, and differing in their ability to inhibit the expression of a coagulation Factor X gene by not more than about 5, 10, 15, 20, 25, or 30% inhibition from a dsRNA comprising the full sequence, are contemplated to be within the scope of the present invention.

[0164] In addition, the RNAs provided in Tables 2-3 identify a site(s) in a coagulation Factor X transcript that is susceptible to RISC-mediated cleavage. As such, the present invention further features iRNAs that target within one of these sites. As used herein, an iRNA is said to target within a particular site of an RNA transcript if the iRNA promotes cleavage of the transcript anywhere within that particular site. Such an iRNA will generally include at least about 19 contiguous nucleotides from any one of the sequences provided in any one of Tables 2-3 coupled to additional nucleotide sequences taken from the region contiguous to the selected sequence in a coagulation Factor X gene.

[0165] An RNAi agent as described herein can contain one or more mismatches to the target sequence. In one embodiment, an RNAi agent as described herein contains no more than 3 mismatches (i.e., 3, 2, 1, or 0 mismatches). In one embodiment, an RNAi agent as described herein contains no more than 2 mismatches. In one embodiment, an RNAi agent as described herein contains no more than 1 mismatch. In one embodiment, an RNAi agent as described herein contains 0 mismatches. In certain embodiments, if the antisense strand of the RNAi agent contains mismatches to the target sequence, the mismatch can optionally be restricted to be within the last 5 nucleotides from either the 5′- or 3′-end of the region of complementarity. For example, in such embodiments, for a 23 nucleotide RNAi agent, the strand which is complementary to a region of an F10 gene generally does not contain any mismatch within the central 13 nucleotides. The methods described herein or methods known in the art can be used to determine whether an RNAi agent containing a mismatch to a target sequence is effective in inhibiting the expression of an F10 gene. Consideration of the efficacy of RNAi agents with mismatches in inhibiting expression of an F10 gene is important, especially if the particular region of complementarity in an F10 gene is known to have polymorphic sequence variation within the population.

### III. Modified iRNAs of the Invention

[0166] In certain embodiments, the RNA of the iRNA of the invention e.g., a dsRNA, is un-modified, and does not comprise, e.g., chemical modifications or conjugations known in the art and described herein. In other embodiments, the RNA of an iRNA of the invention, e.g., a dsRNA, is chemically modified to enhance stability or other beneficial characteristics. In certain embodiments of the invention, substantially all of the nucleotides of an iRNA of the invention are modified. In other embodiments of the invention, all of the nucleotides of an iRNA or substantially all of the nucleotides of an iRNA are modified, i.e., not more than 5, 4, 3, 2, or lunmodified nucleotides are present in a strand of the iRNA.

[0167] The nucleic acids featured in the invention can be synthesized or modified by methods well established in the art, such as those described in “Current protocols in nucleic acid chemistry,” Beaucage, S. L. et al. (Edrs.), John Wiley & Sons, Inc., New York, NY, USA, which is hereby incorporated herein by reference. Modifications include, for example, end modifications, e.g., 5′-end modifications (phosphorylation, conjugation, inverted linkages) or 3′-end modifications (conjugation, DNA nucleotides, inverted linkages, etc.); base modifications, e.g., replacement with stabilizing bases, destabilizing bases, or bases that base pair with an expanded repertoire of partners, removal of bases (abasic nucleotides), or conjugated bases; sugar modifications (e.g., at the 2′-position or 4′-position) or replacement of the sugar; or backbone modifications, including modification or replacement of the phosphodiester linkages. Specific examples of iRNA compounds useful in the embodiments described herein include, but are not limited to RNAs containing modified backbones or no natural internucleoside linkages. RNAs having modified backbones include, among others, those that do not have a phosphorus atom in the backbone. For the purposes of this specification, and as sometimes referenced in the art, modified RNAs that do not have a phosphorus atom in their internucleoside backbone can also be considered to be oligonucleosides. In some embodiments, a modified iRNA will have a phosphorus atom in its internucleoside backbone.

[0168] Modified RNA backbones include, for example, phosphorothioates, chiral phosphorothioates, phosphorodithioates, phosphotriesters, aminoalkylphosphotriesters, methyl and other alkyl phosphonates including 3′-alkylene phosphonates and chiral phosphonates, phosphinates, phosphoramidates including 3′-amino phosphoramidate and aminoalkylphosphoramidates, thionophosphoramidates, thionoalkylphosphonates, thionoalkylphosphotriesters, and boranophosphates having normal 3′-5′ linkages, 2′-5′-linked analogs of these, and those having inverted polarity wherein the adjacent pairs of nucleoside units are linked 3′-5′ to 5′-3′ or 2′-5′ to 5′-2′. Various salts, mixed salts and free acid forms are also included. In some embodiments of the invention, the dsRNA agents of the invention are in a free acid form. In other embodiments of the invention, the dsRNA agents of the invention are in a salt form. In one embodiment, the dsRNA agents of the invention are in a sodium salt form. In certain embodiments, when the dsRNA agents of the invention are in the sodium salt form, sodium ions are present in the agent as counterions for substantially all of the phosphodiester or phosphorothiotate groups present in the agent. Agents in which substantially all of the phosphodiester or phosphorothioate linkages have a sodium counterion include not more than 5, 4, 3, 2, or 1 phosphodiester or phosphorothioate linkages without a sodium counterion. In some embodiments, when the dsRNA agents of the invention are in the sodium salt form, sodium ions are present in the agent as counterions for all of the phosphodiester or phosphorothiotate groups present in the agent.

[0169] Representative U.S. patents that teach the preparation of the above phosphorus-containing linkages include, but are not limited to, U.S. Pat. Nos. 3,687,808; 4,469,863; 4,476,301; 5,023,243; 5,177,195; 5,188,897; 5,264,423; 5,276,019; 5,278,302; 5,286,717; 5,321,131; 5,399,676; 5,405,939; 5,453,496; 5,455,233; 5,466,677; 5,476,925; 5,519,126; 5,536,821; 5,541,316; 5,550,111; 5,563,253; 5,571,799; 5,587,361; 5,625,050; 6,028,188; 6,124,445; 6,160,109; 6,169,170; 6,172,209; 6,239,265; 6,277,603; 6,326,199; 6,346,614; 6,444,423; 6,531,590; 6,534,639; 6,608,035; 6,683,167; 6,858,715; 6,867,294; 6,878,805; 7,015,315; 7,041,816; 7,273,933; 7,321,029; and U.S. Pat. RE39464, the entire contents of each of which are hereby incorporated herein by reference.

[0170] Modified RNA backbones that do not include a phosphorus atom therein have backbones that are formed by short chain alkyl or cycloalkyl internucleoside linkages, mixed heteroatoms and alkyl or cycloalkyl internucleoside linkages, or one or more short chain heteroatomic or heterocyclic internucleoside linkages. These include those having morpholino linkages (formed in part from the sugar portion of a nucleoside); siloxane backbones; sulfide, sulfoxide and sulfone backbones; formacetyl and thioformacetyl backbones; methylene formacetyl and thioformacetyl backbones; alkene containing backbones; sulfamate backbones; methyleneimino and methylenehydrazino backbones; sulfonate and sulfonamide backbones; amide backbones; and others having mixed N, O, S, and CH₂ component parts.

[0171] Representative U.S. patents that teach the preparation of the above oligonucleosides include, but are not limited to, U.S. Pat. Nos. 5,034,506; 5,166,315; 5,185,444; 5,214,134; 5,216,141; 5,235,033; 5,64,562; 5,264,564; 5,405,938; 5,434,257; 5,466,677; 5,470,967; 5,489,677; 5,541,307; 5,561,225; 5,596,086; 5,602,240; 5,608,046; 5,610,289; 5,618,704; 5,623,070; 5,663,312; 5,633,360; 5,677,437; and 5,677,439, the entire contents of each of which are hereby incorporated herein by reference.

[0172] Suitable RNA mimetics are contemplated for use in iRNAs provided herein, in which both the sugar and the internucleoside linkage, i.e., the backbone, of the nucleotide units are replaced with novel groups. The base units are maintained for hybridization with an appropriate nucleic acid target compound. One such oligomeric compound in which an RNA mimetic that has been shown to have excellent hybridization properties is referred to as a peptide nucleic acid (PNA). In PNA compounds, the sugar backbone of an RNA is replaced with an amide containing backbone, in particular an aminoethylglycine backbone. The nucleobases are retained and are bound directly or indirectly to aza nitrogen atoms of the amide portion of the backbone. Representative US patents that teach the preparation of PNA compounds include, but are not limited to, U.S. Pat. Nos. 5,539,082; 5,714,331; and 5,719,262, the entire contents of each of which are hereby incorporated herein by reference. Additional PNA compounds suitable for use in the iRNAs of the invention are described in, for example, in Nielsen et al., Science, 1991, 254, 1497-1500.

[0173] Some embodiments featured in the invention include RNAs with phosphorothioate backbones and oligonucleosides with heteroatom backbones, and in particular —CH₂—NH—CH₂—, —CH₂—N(CH₃)—O—CH₂—[known as a methylene (methylimino) or MMI backbone], —CH₂—O—N(CH₃)—CH₂—, —CH₂—N(CH₃)—N(CH₃)—CH₂— and —N(CH₃)—CH₂—CH₂—[wherein the native phosphodiester backbone is represented as —O—P—O—CH₂—] of the above-referenced U.S. Pat. No. 5,489,677, and the amide backbones of the above-referenced U.S. Pat. No. 5,602,240. In some embodiments, the RNAs featured herein have morpholino backbone structures of the above-referenced U.S. Pat. No. 5,034,506. The native phosphodiester backbone can be represented as O—P(O)(OH)—OCH2-.

[0174] Modified RNAs can also contain one or more substituted sugar moieties. The iRNAs, e.g., dsRNAs, featured herein can include one of the following at the 2′-position: OH; F; O-, S-, or N-alkyl; O-, S-, or N-alkenyl; O-, S- or N-alkynyl; or O-alkyl-O-alkyl, wherein the alkyl, alkenyl and alkynyl can be substituted or unsubstituted C₁ to C₁₀ alkyl or C₂ to C₁₀ alkenyl and alkynyl. Exemplary suitable modifications include O[(CH₂)ₙO]ₘCH₃, O(CH₂)·ₙOCH₃, O(CH₂)ₙNH₂, O(CH₂)ₙCH₃, O(CH₂)ₙONH₂, and O(CH₂)ₙON[(CH₂)ₙCH₃)]₂, where n and m are from 1 to about 10. In other embodiments, dsRNAs include one of the following at the 2′ position: C₁ to C₁₀ lower alkyl, substituted lower alkyl, alkaryl, aralkyl, O-alkaryl or O-aralkyl, SH, SCH₃, OCN, Cl, Br, CN, CF₃, OCF₃, SOCH₃, SO₂CH₃, ONO₂, NO₂, N₃, NH₂, heterocycloalkyl, heterocycloalkaryl, aminoalkylamino, polyalkylamino, substituted silyl, an RNA cleaving group, a reporter group, an intercalator, a group for improving the pharmacokinetic properties of an iRNA, or a group for improving the pharmacodynamic properties of an iRNA, and other substituents having similar properties. In some embodiments, the modification includes a 2′-methoxyethoxy (2′-O—CH₂CH₂OCH₃, also known as 2′-O-(2-methoxyethyl) or 2′-MOE) (Martin et al., Helv. Chim. Acta, 1995, 78:486-504) i.e., an alkoxy-alkoxy group. Another exemplary modification is 2′-dimethylaminooxyethoxy, i.e., a O(CH₂)₂ON(CH₃)₂ group, also known as 2′-DMAOE, as described in examples herein below, and 2′-dimethylaminoethoxyethoxy (also known in the art as 2′-O-dimethylaminoethoxyethyl or 2′-DMAEOE), i.e., 2′-O—CH₂—O—CH₂—N(CH₂)₂. Further exemplary modifications include: 5′-Me-2′-F nucleotides, 5′-Me-2′-OMe nucleotides, 5′-Me-2′-deoxynucleotides, (both R and S isomers in these three families); 2′-alkoxyalkyl; and 2′-NMA (N-methylacetamide).

[0175] Other modifications include 2′-methoxy (2′-OCH3), 2′-aminopropoxy (2′-OCH₂CH₂CH₂NH₂) and 2′-fluoro (2′-F). Similar modifications can also be made at other positions on the RNA of an iRNA, particularly the 3′ position of the sugar on the 3′ terminal nucleotide or in 2′-5′ linked dsRNAs and the 5′ position of 5′ terminal nucleotide. iRNAs can also have sugar mimetics such as cyclobutyl moieties in place of the pentofuranosyl sugar. Representative US patents that teach the preparation of such modified sugar structures include, but are not limited to, U.S. Pat. Nos. 4,981,957; 5,118,800; 5,319,080; 5,359,044; 5,393,878; 5,446,137; 5,466,786; 5,514,785; 5,519,134; 5,567,811; 5,576,427; 5,591,722; 5,597,909; 5,610,300; 5,627,053; 5,639,873; 5,646,265; 5,658,873; 5,670,633; and 5,700,920, certain of which are commonly owned with the instant application. The entire contents of each of the foregoing are hereby incorporated herein by reference.

[0176] An iRNA can also include nucleobase (often referred to in the art simply as “base”) modifications or substitutions. As used herein, “unmodified” or “natural” nucleobases include the purine bases adenine (A) and guanine (G), and the pyrimidine bases thymine (T), cytosine (C), and uracil (U). Modified nucleobases include other synthetic and natural nucleobases such as deoxythimidine (dT), 5-methylcytosine (5-me-C), 5-hydroxymethyl cytosine, xanthine, hypoxanthine, 2-aminoadenine, 6-methyl and other alkyl derivatives of adenine and guanine, 2-propyl and other alkyl derivatives of adenine and guanine, 2-thiouracil, 2-thiothymine and 2-thiocytosine, 5-halouracil and cytosine, 5-propynyl uracil and cytosine, 6-azo uracil, cytosine and thymine, 5-uracil (pseudouracil), 4-thiouracil, 8-halo, 8-amino, 8-thiol, 8-thioalkyl, 8-hydroxyl anal other 8-substituted adenines and guanines, 5-halo, particularly 5-bromo, 5-trifluoromethyl and other 5-substituted uracils and cytosines, 7-methylguanine and 7-methyladenine, 8-azaguanine and 8-azaadenine, 7-deazaguanine and 7-daazaadenine and 3-deazaguanine and 3-deazaadenine. Further nucleobases include those disclosed in U.S. Pat. No. 3,687,808, those disclosed in Modified Nucleosides in Biochemistry, Biotechnology and Medicine, Herdewijn, P. ed. Wiley-VCH, 2008; those disclosed in The Concise Encyclopedia Of Polymer Science And Engineering, pages 858-859, Kroschwitz, J. L, ed. John Wiley & Sons, 1990, these disclosed by Englisch et al., Angewandte Chemie, International Edition, 1991, 30, 613, and those disclosed by Sanghvi, Y S., Chapter 15, dsRNA Research and Applications, pages 289-302, Crooke, S. T. and Lebleu, B., Ed., CRC Press, 1993. Certain of these nucleobases are particularly useful for increasing the binding affinity of the oligomeric compounds featured in the invention. These include 5-substituted pyrimidines, 6-azapyrimidines and N-2, N-6 and 0-6 substituted purines, including 2-aminopropyladenine, 5-propynyluracil and 5-propynylcytosine. 5-methylcytosine substitutions have been shown to increase nucleic acid duplex stability by 0.6-1.2° C. (Sanghvi, Y. S., Crooke, S. T. and Lebleu, B., Eds., dsRNA Research and Applications, CRC Press, Boca Raton, 1993, pp. 276-278) and are exemplary base substitutions, even more particularly when combined with 2′-O-methoxyethyl sugar modifications.

[0177] Representative U.S. patents that teach the preparation of certain of the above noted modified nucleobases as well as other modified nucleobases include, but are not limited to, the above noted U.S. Pat. Nos. 3,687,808, 4,845,205; 5,130,30; 5,134,066; 5,175,273; 5,367,066; 5,432,272; 5,457,187; 5,459,255; 5,484,908; 5,502,177; 5,525,711; 5,552,540; 5,587,469; 5,594,121, 5,596,091; 5,614,617; 5,681,941; 5,750,692; 6,015,886; 6,147,200; 6,166,197; 6,222,025; 6,235,887; 6,380,368; 6,528,640; 6,639,062; 6,617,438; 7,045,610; 7,427,672; and 7,495,088, the entire contents of each of which are hereby incorporated herein by reference.

[0178] In some embodiments, the RNA of an iRNA can also be modified to include one or more bicyclic sugar moieties. A “bicyclic sugar” is a furanosyl ring modified by the bridging of two atoms.

[0179] A “bicyclic nucleoside” (“BNA”) is a nucleoside having a sugar moiety comprising a bridge connecting two carbon atoms of the sugar ring, thereby forming a bicyclic ring system. In certain embodiments, the bridge connects the 4′-carbon and the 2′-carbon of the sugar ring. Thus, in some embodiments an agent of the invention may include one or more locked nucleic acids (LNA). A locked nucleic acid is a nucleotide having a modified ribose moiety in which the ribose moiety comprises an extra bridge connecting the 2′ and 4′ carbons. In other words, an LNA is a nucleotide comprising a bicyclic sugar moiety comprising a 4′-CH₂—O-2′ bridge. This structure effectively “locks” the ribose in the 3′-endo structural conformation. The addition of locked nucleic acids to siRNAs has been shown to increase siRNA stability in serum, and to reduce off-target effects (Elmen, J. et al., (2005) Nucleic Acids Research 33(1):439-447; Mook, O R. et al., (2007) Mol Canc Ther 6(3):833-843; Grunweller, A. et al., (2003) Nucleic Acids Research 31(12):3185-3193). Examples of bicyclic nucleosides for use in the polynucleotides of the invention include without limitation nucleosides comprising a bridge between the 4′ and the 2′ ribosyl ring atoms. In certain embodiments, the antisense polynucleotide agents of the invention include one or more bicyclic nucleosides comprising a 4′ to 2′ bridge.

[0180] A locked nucleoside can be represented by the structure (omitting stereochemistry),

[chemical structure]

[0181] wherein B is a nucleobase or modified nucleobase and L is the linking group that joins the 2′-carbon to the 4′-carbon of the ribose ring. Examples of such 4′ to 2′ bridged bicyclic nucleosides, include but are not limited to 4′-(CH₂)—O-2′ (LNA); 4′-(CH₂)—S-2′; 4′-(CH₂)₂-O-2′ (ENA); 4′-CH(CH₃)—O-2′ (also referred to as “constrained ethyl” or “cEt”) and 4′-CH(CH₂OCH₃)—O-2′ (and analogs thereof; see, e.g., U.S. Pat. No. 7,399,845); 4′-C(CH₃)(CH₃)—O-2′ (and analogs thereof; see e.g., U.S. Pat. No. 8,278,283); 4′-CH₂—N(OCH₃)-2′ (and analogs thereof; see e.g., U.S. Pat. No. 8,278,425); 4′-CH₂—O—N(CH₃)-2′ (see, e.g., U.S. Patent Publication No. 2004/0171570); 4′-CH₂—N(R)—O-2′, wherein R is H, C1-C12 alkyl, or a nitrogen protecting group (see, e.g., U.S. Pat. No. 7,427,672); 4′-CH₂—C(H)(CH₃)-2′ (see, e.g., Chattopadhyaya et al., J. Org. Chem., 2009, 74, 118-134); and 4′-CH₂—C(═CH₂)-2′ (and analogs thereof; see, e.g., U.S. Pat. No. 8,278,426). The entire contents of each of the foregoing are hereby incorporated herein by reference.

[0182] Additional representative U.S. patents and U.S. patenttent Publications that teach the preparation of locked nucleic acid nucleotides include, but are not limited to, the following: U.S. Pat. Nos. 6,268,490; 6,525,191; 6,670,461; 6,770,748; 6,794,499; 6,998,484; 7,053,207; 7,034,133; 7,084,125; 7,399,845; 7,427,672; 7,569,686; 7,741,457; 8,022,193; 8,030,467; 8,278,425; 8,278,426; 8,278,283; US 2008/0039618; and US 2009/0012281, the entire contents of each of which are hereby incorporated herein by reference.

[0183] Any of the foregoing bicyclic nucleosides can be prepared having one or more stereochemical sugar configurations including for example α-L-ribofuranose and β-D-ribofuranose (see WO 99/14226).

[0184] The RNA of an iRNA can also be modified to include one or more constrained ethyl nucleotides. As used herein, a “constrained ethyl nucleotide” or “cEt” is a locked nucleic acid comprising a bicyclic sugar moiety comprising a 4′-CH(CH₃)—O-2′ bridge (i.e., L in the preceding structure). In one embodiment, a constrained ethyl nucleotide is in the S conformation referred to herein as “S-cEt.”

[0185] An iRNA of the invention may also include one or more “conformationally restricted nucleotides” (“CRN”). CRN are nucleotide analogs with a linker connecting the C2′ and C4′ carbons of ribose or the C3 and —C5′ carbons of ribose. CRN lock the ribose ring into a stable conformation and increase the hybridization affinity to mRNA. The linker is of sufficient length to place the oxygen in an optimal position for stability and affinity resulting in less ribose ring puckering.

[0186] Representative publications that teach the preparation of certain of the above noted CRN include, but are not limited to, US2013/0190383; and WO2013/036868, the entire contents of each of which are hereby incorporated herein by reference.

[0187] In some embodiments, an iRNA of the invention comprises one or more monomers that are UNA (unlocked nucleic acid) nucleotides. UNA is unlocked acyclic nucleic acid, wherein any of the bonds of the sugar has been removed, forming an unlocked “sugar” residue. In one example, UNA also encompasses monomer with bonds between C1′-C4′ have been removed (i.e. the covalent carbon-oxygen-carbon bond between the C1′ and C4′ carbons). In another example, the C2′-C3′ bond (i.e. the covalent carbon-carbon bond between the C2′ and C3′ carbons) of the sugar has been removed (see Nuc. Acids Symp. Series, 52, 133-134 (2008) and Fluiter et al., Mol. Biosyst., 2009, 10, 1039 hereby incorporated by reference).

[0188] Representative U.S. publications that teach the preparation of UNA include, but are not limited to, U.S. Pat. No. 8,314,227; and US2013/0096289; US2013/0011922; and US2011/0313020, the entire contents of each of which are hereby incorporated herein by reference.

[0189] Potentially stabilizing modifications to the ends of RNA molecules can include N-(acetylaminocaproyl)-4-hydroxyprolinol (Hyp-C6-NHAc), N-(caproyl-4-hydroxyprolinol (Hyp-C6), N-(acetyl-4-hydroxyprolinol (Hyp-NHAc), thymidine-2′-O-deoxythymidine (ether), N-(aminocaproyl)-4-hydroxyprolinol (Hyp-C6-amino), 2-docosanoyl-uridine-3″-phosphate, inverted base dT(idT) and others. Disclosure of this modification can be found in WO2011/005861.

[0190] Other modifications of the nucleotides of an iRNA of the invention include a 5′ phosphate or 5′ phosphate mimic, e.g., a 5′-terminal phosphate or phosphate mimic on the antisense strand of an iRNA. Vinyl phosphate modifications are also contemplated for the compositions and methods of the instant disclosure. An exemplary vinyl phosphate structure includes the preceding structure, where R5′ is ═C(H)—OP(O)(OH)2 and the double bond between the C5′ carbon and R5′ is in the E or Z orientation (e.g., E orientation). Suitable phosphate mimics are disclosed in, for example US2012/0157511, the entire contents of which are incorporated herein by reference.

[0191] In certain embodiments, the compositions and methods of the disclosure include a vinyl phosphonate (VP) modification of an RNAi agent as described herein. In exemplary embodiments, a 5′-vinyl phosphonate modified nucleotide of the disclosure has the structure:

[chemical structure]

[0192] wherein X is O or S;
[0193] R is hydrogen, hydroxy, fluoro, or C₁₋₂₀alkoxy (e.g., methoxy or n-hexadecyloxy);
[0194] R^{5′} is ═C(H)—P(O)(OH)₂ and the double bond between the C5′ carbon and R5′ is in the E or Z orientation (e.g., E orientation); and
[0195] B is a nucleobase or a modified nucleobase, optionally where B is adenine, guanine, cytosine, thymine, or uracil.

[0196] A. Modified iRNAs Comprising Motifs of the Invention

[0197] In certain aspects of the invention, the double stranded RNA agents of the invention include agents with chemical modifications as disclosed, for example, in WO2013/075035, the entire contents of each of which are incorporated herein by reference. WO2013/075035 provides motifs of three identical modifications on three consecutive nucleotides into a sense strand or antisense strand of a dsRNAi agent, particularly at or near the cleavage site. In some embodiments, the sense strand and antisense strand of the dsRNAi agent may otherwise be completely modified. The introduction of these motifs interrupts the modification pattern, if present, of the sense or antisense strand. The dsRNAi agent may be optionally conjugated with a GalNAc derivative ligand, for instance on the sense strand.

[0198] More specifically, when the sense strand and antisense strand of the double stranded RNA agent are completely modified to have one or more motifs of three identical modifications on three consecutive nucleotides at or near the cleavage site of at least one strand of a dsRNAi agent, the gene silencing activity of the dsRNAi agent was observed.

[0199] Accordingly, the invention provides double stranded RNA agents capable of inhibiting the expression of a target gene (i.e., F10 gene) in vivo. The RNAi agent comprises a sense strand and an antisense strand. Each strand of the RNAi agent may be, for example, 17-30 nucleotides in length, 25-30 nucleotides in length, 27-30 nucleotides in length, 19-25 nucleotides in length, 19-23 nucleotides in length, 19-21 nucleotides in length, 21-25 nucleotides in length, or 21-23 nucleotides in length.

[0200] The sense strand and antisense strand typically form a duplex double stranded RNA (“dsRNA”), also referred to herein as “dsRNAi agent.” The duplex region of a dsRNAi agent may be, for example, the duplex region can be 27-30 nucleotide pairs in length, 19-25 nucleotide pairs in length, 19-23 nucleotide pairs in length, 19-21 nucleotide pairs in length, 21-25 nucleotide pairs in length, or 21-23 nucleotide pairs in length. In another example, the duplex region is selected from 19, 20, 21, 22, 23, 24, 25, 26, and 27 nucleotides in length.

[0201] In certain embodiments, the dsRNAi agent may contain one or more overhang regions or capping groups at the 3′-end, 5′-end, or both ends of one or both strands. The overhang can be, independently, 1-6 nucleotides in length, for instance 2-6 nucleotides in length, 1-5 nucleotides in length, 2-5 nucleotides in length, 1-4 nucleotides in length, 2-4 nucleotides in length, 1-3 nucleotides in length, 2-3 nucleotides in length, or 1-2 nucleotides in length. In certain embodiments, the overhang regions can include extended overhang regions as provided above. The overhangs can be the result of one strand being longer than the other, or the result of two strands of the same length being staggered. The overhang can form a mismatch with the target mRNA or it can be complementary to the gene sequences being targeted or can be another sequence. The first and second strands can also be joined, e.g., by additional bases to form a hairpin, or by other non-base linkers.

[0202] In certain embodiments, the nucleotides in the overhang region of the dsRNAi agent can each independently be a modified or unmodified nucleotide including, but no limited to 2′-sugar modified, such as, 2′-F, 2′-O-methyl, thymidine (T), 2′-O-methoxyethyl-5-methyluridine (Teo), 2′-O-methoxyethyladenosine (Aeo), 2′-O-methoxyethyl-5-methylcytidine (m5Ceo), and any combinations thereof.

[0203] For example, TT can be an overhang sequence for either end on either strand. The overhang can form a mismatch with the target mRNA or it can be complementary to the gene sequences being targeted or can be another sequence.

[0204] The 5′- or 3′-overhangs at the sense strand, antisense strand, or both strands of the dsRNAi agent may be phosphorylated. In some embodiments, the overhang region(s) contains two nucleotides having a phosphorothioate between the two nucleotides, where the two nucleotides can be the same or different. In some embodiments, the overhang is present at the 3′-end of the sense strand, antisense strand, or both strands. In some embodiments, this 3′-overhang is present in the antisense strand. In some embodiments, this 3′-overhang is present in the sense strand.

[0205] The dsRNAi agent may contain only a single overhang, which can strengthen the interference activity of the RNAi, without affecting its overall stability. For example, the single-stranded overhang may be located at the 3′-end of the sense strand or, alternatively, at the 3-end of the antisense strand. The RNAi may also have a blunt end, located at the 5′-end of the antisense strand (or the 3′-end of the sense strand) or vice versa. Generally, the antisense strand of the dsRNAi agent has a nucleotide overhang at the 3′-end, and the 5′-end is blunt. While not wishing to be bound by theory, the asymmetric blunt end at the 5′-end of the antisense strand and 3′-end overhang of the antisense strand favor the guide strand loading into RISC process.

[0206] In certain embodiments, the dsRNAi agent is a double blunt-ended of 19 nucleotides in length, wherein the sense strand contains at least one motif of three 2′-F modifications on three consecutive nucleotides at positions 7, 8, 9 from the 5′end. The antisense strand contains at least one motif of three 2′-O-methyl modifications on three consecutive nucleotides at positions 11, 12, 13 from the 5′end.

[0207] In other embodiments, the dsRNAi agent is a double blunt-ended of 20 nucleotides in length, wherein the sense strand contains at least one motif of three 2′-F modifications on three consecutive nucleotides at positions 8, 9, 10 from the 5′end. The antisense strand contains at least one motif of three 2′-O-methyl modifications on three consecutive nucleotides at positions 11, 12, 13 from the 5′end.

[0208] In yet other embodiments, the dsRNAi agent is a double blunt-ended of 21 nucleotides in length, wherein the sense strand contains at least one motif of three 2′-F modifications on three consecutive nucleotides at positions 9, 10, 11 from the 5′end. The antisense strand contains at least one motif of three 2′-O-methyl modifications on three consecutive nucleotides at positions 11, 12, 13 from the 5′end.

[0209] In certain embodiments, the dsRNAi agent comprises a 21 nucleotide sense strand and a 23 nucleotide antisense strand, wherein the sense strand contains at least one motif of three 2′-F modifications on three consecutive nucleotides at positions 9, 10, 11 from the 5′end; the antisense strand contains at least one motif of three 2′-O-methyl modifications on three consecutive nucleotides at positions 11, 12, 13 from the 5′end, wherein one end of the RNAi agent is blunt, while the other end comprises a 2 nucleotide overhang. Preferably, the 2 nucleotide overhang is at the 3′-end of the antisense strand.

[0210] When the 2 nucleotide overhang is at the 3′-end of the antisense strand, there may be two phosphorothioate internucleotide linkages between the terminal three nucleotides, wherein two of the three nucleotides are the overhang nucleotides, and the third nucleotide is a paired nucleotide next to the overhang nucleotide. In one embodiment, the RNAi agent additionally has two phosphorothioate internucleotide linkages between the terminal three nucleotides at both the 5′-end of the sense strand and at the 5′-end of the antisense strand. In certain embodiments, every nucleotide in the sense strand and the antisense strand of the dsRNAi agent, including the nucleotides that are part of the motifs are modified nucleotides. In certain embodiments each residue is independently modified with a 2′-O-methyl or 3′-fluoro, e.g., in an alternating motif. Optionally, the dsRNAi agent further comprises a ligand (preferably GalNAc).

[0211] In certain embodiments, the dsRNAi agent comprises a sense and an antisense strand, wherein the sense strand is 25-30 nucleotide residues in length, wherein starting from the 5′ terminal nucleotide (position 1) positions 1 to 23 of the first strand comprise at least 8 ribonucleotides; the antisense strand is 36-66 nucleotide residues in length and, starting from the 3′ terminal nucleotide, comprises at least 8 ribonucleotides in the positions paired with positions 1-23 of sense strand to form a duplex; wherein at least the 3′terminal nucleotide of antisense strand is unpaired with sense strand, and up to 6 consecutive 3′ terminal nucleotides are unpaired with sense strand, thereby forming a 3′ single stranded overhang of 1-6 nucleotides; wherein the 5′ terminus of antisense strand comprises from 10-30 consecutive nucleotides which are unpaired with sense strand, thereby forming a 10-30 nucleotide single stranded 5′ overhang; wherein at least the sense strand 5′ terminal and 3′ terminal nucleotides are base paired with nucleotides of antisense strand when sense and antisense strands are aligned for maximum complementarity, thereby forming a substantially duplexed region between sense and antisense strands; and antisense strand is sufficiently complementary to a target RNA along at least 19 ribonucleotides of antisense strand length to reduce target gene expression when the double stranded nucleic acid is introduced into a mammalian cell; and wherein the sense strand contains at least one motif of three 2′-F modifications on three consecutive nucleotides, where at least one of the motifs occurs at or near the cleavage site. The antisense strand contains at least one motif of three 2′-O-methyl modifications on three consecutive nucleotides at or near the cleavage site.

[0212] In certain embodiments, the dsRNAi agent comprises sense and antisense strands, wherein the dsRNAi agent comprises a first strand having a length which is at least 25 and at most 29 nucleotides and a second strand having a length which is at most 30 nucleotides with at least one motif of three 2′-O-methyl modifications on three consecutive nucleotides at position 11, 12, 13 from the 5′ end; wherein the 3′ end of the first strand and the 5′ end of the second strand form a blunt end and the second strand is 1-4 nucleotides longer at its 3′ end than the first strand, wherein the duplex region which is at least 25 nucleotides in length, and the second strand is sufficiently complementary to a target mRNA along at least 19 nucleotide of the second strand length to reduce target gene expression when the RNAi agent is introduced into a mammalian cell, and wherein Dicer cleavage of the dsRNAi agent preferentially results in an siRNA comprising the 3′-end of the second strand, thereby reducing expression of the target gene in the mammal. Optionally, the dsRNAi agent further comprises a ligand.

[0213] In certain embodiments, the sense strand of the dsRNAi agent contains at least one motif of three identical modifications on three consecutive nucleotides, where one of the motifs occurs at the cleavage site in the sense strand.

[0214] In certain embodiments, the antisense strand of the dsRNAi agent can also contain at least one motif of three identical modifications on three consecutive nucleotides, where one of the motifs occurs at or near the cleavage site in the antisense strand.

[0215] For a dsRNAi agent having a duplex region of 19-23 nucleotides in length, the cleavage site of the antisense strand is typically around the 10, 11, and 12 positions from the 5′-end. Thus the motifs of three identical modifications may occur at the 9, 10, 11 positions; the 10, 11, 12 positions; the 11, 12, 13 positions; the 12, 13, 14 positions; or the 13, 14, 15 positions of the antisense strand, the count starting from the first nucleotide from the 5′-end of the antisense strand, or, the count starting from the first paired nucleotide within the duplex region from the 5′-end of the antisense strand. The cleavage site in the antisense strand may also change according to the length of the duplex region of the dsRNAi agent from the 5′-end.

[0216] The sense strand of the dsRNAi agent may contain at least one motif of three identical modifications on three consecutive nucleotides at the cleavage site of the strand; and the antisense strand may have at least one motif of three identical modifications on three consecutive nucleotides at or near the cleavage site of the strand. When the sense strand and the antisense strand form a dsRNA duplex, the sense strand and the antisense strand can be so aligned that one motif of the three nucleotides on the sense strand and one motif of the three nucleotides on the antisense strand have at least one nucleotide overlap, i.e., at least one of the three nucleotides of the motif in the sense strand forms a base pair with at least one of the three nucleotides of the motif in the antisense strand. Alternatively, at least two nucleotides may overlap, or all three nucleotides may overlap.

[0217] In some embodiments, the sense strand of the dsRNAi agent may contain more than one motif of three identical modifications on three consecutive nucleotides. The first motif may occur at or near the cleavage site of the strand and the other motifs may be a wing modification. The term “wing modification” herein refers to a motif occurring at another portion of the strand that is separated from the motif at or near the cleavage site of the same strand. The wing modification is either adjacent to the first motif or is separated by at least one or more nucleotides. When the motifs are immediately adjacent to each other then the chemistries of the motifs are distinct from each other, and when the motifs are separated by one or more nucleotide than the chemistries can be the same or different. Two or more wing modifications may be present. For instance, when two wing modifications are present, each wing modification may occur at one end relative to the first motif which is at or near cleavage site or on either side of the lead motif.

[0218] Like the sense strand, the antisense strand of the dsRNAi agent may contain more than one motifs of three identical modifications on three consecutive nucleotides, with at least one of the motifs occurring at or near the cleavage site of the strand. This antisense strand may also contain one or more wing modifications in an alignment similar to the wing modifications that may be present on the sense strand.

[0219] In some embodiments, the wing modification on the sense strand or antisense strand of the dsRNAi agent typically does not include the first one or two terminal nucleotides at the 3′-end, 5′-end, or both ends of the strand.

[0220] In other embodiments, the wing modification on the sense strand or antisense strand of the dsRNAi agent typically does not include the first one or two paired nucleotides within the duplex region at the 3′-end, 5′-end, or both ends of the strand.

[0221] When the sense strand and the antisense strand of the dsRNAi agent each contain at least one wing modification, the wing modifications may fall on the same end of the duplex region, and have an overlap of one, two, or three nucleotides.

[0222] When the sense strand and the antisense strand of the dsRNAi agent each contain at least two wing modifications, the sense strand and the antisense strand can be so aligned that two modifications each from one strand fall on one end of the duplex region, having an overlap of one, two, or three nucleotides; two modifications each from one strand fall on the other end of the duplex region, having an overlap of one, two or three nucleotides; two modifications one strand fall on each side of the lead motif, having an overlap of one, two or three nucleotides in the duplex region.

[0223] In some embodiments, every nucleotide in the sense strand and antisense strand of the dsRNAi agent, including the nucleotides that are part of the motifs, may be modified. Each nucleotide may be modified with the same or different modification which can include one or more alteration of one or both of the non-linking phosphate oxygens or of one or more of the linking phosphate oxygens; alteration of a constituent of the ribose sugar, e.g., of the 2′-hydroxyl on the ribose sugar; wholesale replacement of the phosphate moiety with “dephospho” linkers; modification or replacement of a naturally occurring base; and replacement or modification of the ribose-phosphate backbone.

[0224] As nucleic acids are polymers of subunits, many of the modifications occur at a position which is repeated within a nucleic acid, e.g., a modification of a base, or a phosphate moiety, or a non-linking O of a phosphate moiety. In some cases the modification will occur at all of the subject positions in the nucleic acid but in many cases it will not. By way of example, a modification may only occur at a 3′- or 5′ terminal position, may only occur in a terminal region, e.g., at a position on a terminal nucleotide or in the last 2, 3, 4, 5, or 10 nucleotides of a strand. A modification may occur in a double strand region, a single strand region, or in both. A modification may occur only in the double strand region of an RNA or may only occur in a single strand region of a RNA. For example, a phosphorothioate modification at a non-linking O position may only occur at one or both termini, may only occur in a terminal region, e.g., at a position on a terminal nucleotide or in the last 2, 3, 4, 5, or 10 nucleotides of a strand, or may occur in double strand and single strand regions, particularly at termini. The 5′-end or ends can be phosphorylated.

[0225] It may be possible, e.g., to enhance stability, to include particular bases in overhangs, or to include modified nucleotides or nucleotide surrogates, in single strand overhangs, e.g., in a 5′- or 3′-overhang, or in both. For example, it can be desirable to include purine nucleotides in overhangs. In some embodiments all or some of the bases in a 3′- or 5′-overhang may be modified, e.g., with a modification described herein. Modifications can include, e.g., the use of modifications at the 2′ position of the ribose sugar with modifications that are known in the art, e.g., the use of deoxyribonucleotides, 2′-deoxy-2′-fluoro (2′-F) or 2′-O-methyl modified instead of the ribosugar of the nucleobase, and modifications in the phosphate group, e.g., phosphorothioate modifications. Overhangs need not be homologous with the target sequence.

[0226] In some embodiments, each residue of the sense strand and antisense strand is independently modified with LNA, glycol nucleic acid (GNA), hexitol nucleic acid (HNA), a cyclohexene nucleic acid (CeNA), CRN, cET, UNA, 2′-methoxyethyl, 2′-O-methyl, 2′-O-allyl, 2′-C-allyl, 2′-deoxy, 2′-hydroxyl, or 2′-fluoro. The strands can contain more than one modification. In one embodiment, each residue of the sense strand and antisense strand is independently modified with 2′-O-methyl or 2′-fluoro.

[0227] At least two different modifications are typically present on the sense strand and antisense strand. Those two modifications may be the 2′-O-methyl or 2′-fluoro modifications, or others.

[0228] In certain embodiments, the Nₐ or N_{b} comprise modifications of an alternating pattern. The term “alternating motif” as used herein refers to a motif having one or more modifications, each modification occurring on alternating nucleotides of one strand. The alternating nucleotide may refer to one per every other nucleotide or one per every three nucleotides, or a similar pattern. For example, if A, B and C each represent one type of modification to the nucleotide, the alternating motif can be “ABABABABABAB . . . ,” “AABBAABBAABB . . . ,” “AABAABAABAAB . . . ,” “AAABAAABAAAB . . . ,” “AAABBBAAABBB . . . ,” or “ABCABCABCABC . . . ,” etc.

[0229] The type of modifications contained in the alternating motif may be the same or different. For example, if A, B, C, D each represent one type of modification on the nucleotide, the alternating pattern, i.e., modifications on every other nucleotide, may be the same, but each of the sense strand or antisense strand can be selected from several possibilities of modifications within the alternating motif such as “ABABAB . . . ”, “ACACAC . . . ” “BDBDBD . . . ” or “CDCDCD . . . ,” etc.

[0230] In some embodiments, the dsRNAi agent of the invention comprises the modification pattern for the alternating motif on the sense strand relative to the modification pattern for the alternating motif on the antisense strand is shifted. The shift may be such that the modified group of nucleotides of the sense strand corresponds to a differently modified group of nucleotides of the antisense strand and vice versa. For example, the sense strand when paired with the antisense strand in the dsRNA duplex, the alternating motif in the sense strand may start with “ABABAB” from 5′ to 3′ of the strand and the alternating motif in the antisense strand may start with “BABABA” from 5′ to 3′ of the strand within the duplex region. As another example, the alternating motif in the sense strand may start with “AABBAABB” from 5′ to 3′ of the strand and the alternating motif in the antisense strand may start with “BBAABBAA” from 5′ to 3′ of the strand within the duplex region, so that there is a complete or partial shift of the modification patterns between the sense strand and the antisense strand.

[0231] In some embodiments, the dsRNAi agent comprises the pattern of the alternating motif of 2′-O-methyl modification and 2′-F modification on the sense strand initially has a shift relative to the pattern of the alternating motif of 2′-O-methyl modification and 2′-F modification on the antisense strand initially, i.e., the 2′-O-methyl modified nucleotide on the sense strand base pairs with a 2′-F modified nucleotide on the antisense strand and vice versa. The 1 position of the sense strand may start with the 2′-F modification, and the 1 position of the antisense strand may start with the 2′-O-methyl modification.

[0232] The introduction of one or more motifs of three identical modifications on three consecutive nucleotides to the sense strand or antisense strand interrupts the initial modification pattern present in the sense strand or antisense strand. This interruption of the modification pattern of the sense or antisense strand by introducing one or more motifs of three identical modifications on three consecutive nucleotides to the sense or antisense strand may enhance the gene silencing activity against the target gene.

[0233] In some embodiments, when the motif of three identical modifications on three consecutive nucleotides is introduced to any of the strands, the modification of the nucleotide next to the motif is a different modification than the modification of the motif. For example, the portion of the sequence containing the motif is “ . . . NₐYYYN_{b} . . . ,” where “Y” represents the modification of the motif of three identical modifications on three consecutive nucleotide, and “Nₐ” and “N_{b}” represent a modification to the nucleotide next to the motif “YYY” that is different than the modification of Y, and where Nₐ and N_{b} can be the same or different modifications. Alternatively, Nₐ or N_{b} may be present or absent when there is a wing modification present.

[0234] The iRNA may further comprise at least one phosphorothioate or methylphosphonate internucleotide linkage. The phosphorothioate or methylphosphonate internucleotide linkage modification may occur on any nucleotide of the sense strand, antisense strand, or both strands in any position of the strand. For instance, the internucleotide linkage modification may occur on every nucleotide on the sense strand or antisense strand; each internucleotide linkage modification may occur in an alternating pattern on the sense strand or antisense strand; or the sense strand or antisense strand may contain both internucleotide linkage modifications in an alternating pattern. The alternating pattern of the internucleotide linkage modification on the sense strand may be the same or different from the antisense strand, and the alternating pattern of the internucleotide linkage modification on the sense strand may have a shift relative to the alternating pattern of the internucleotide linkage modification on the antisense strand. In one embodiment, a double-stranded RNAi agent comprises 6-8 phosphorothioate internucleotide linkages. In some embodiments, the antisense strand comprises two phosphorothioate internucleotide linkages at the 5′-end and two phosphorothioate internucleotide linkages at the 3′-end, and the sense strand comprises at least two phosphorothioate internucleotide linkages at either the 5′-end or the 3′-end.

[0235] In some embodiments, the dsRNAi agent comprises a phosphorothioate or methylphosphonate internucleotide linkage modification in the overhang region. For example, the overhang region may contain two nucleotides having a phosphorothioate or methylphosphonate internucleotide linkage between the two nucleotides. Internucleotide linkage modifications also may be made to link the overhang nucleotides with the terminal paired nucleotides within the duplex region. For example, at least 2, 3, 4, or all the overhang nucleotides may be linked through phosphorothioate or methylphosphonate internucleotide linkage, and optionally, there may be additional phosphorothioate or methylphosphonate internucleotide linkages linking the overhang nucleotide with a paired nucleotide that is next to the overhang nucleotide. For instance, there may be at least two phosphorothioate internucleotide linkages between the terminal three nucleotides, in which two of the three nucleotides are overhang nucleotides, and the third is a paired nucleotide next to the overhang nucleotide. These terminal three nucleotides may be at the 3′-end of the antisense strand, the 3′-end of the sense strand, the 5′-end of the antisense strand, or the 5′end of the antisense strand.

[0236] In some embodiments, the 2-nucleotide overhang is at the 3′-end of the antisense strand, and there are two phosphorothioate internucleotide linkages between the terminal three nucleotides, wherein two of the three nucleotides are the overhang nucleotides, and the third nucleotide is a paired nucleotide next to the overhang nucleotide. Optionally, the dsRNAi agent may additionally have two phosphorothioate internucleotide linkages between the terminal three nucleotides at both the 5′-end of the sense strand and at the 5′-end of the antisense strand.

[0237] In one embodiment, the dsRNAi agent comprises mismatch(es) with the target, within the duplex, or combinations thereof. The mismatch may occur in the overhang region or the duplex region. The base pair may be ranked on the basis of their propensity to promote dissociation or melting (e.g., on the free energy of association or dissociation of a particular pairing, the simplest approach is to examine the pairs on an individual pair basis, though next neighbor or similar analysis can also be used). In terms of promoting dissociation: A:U is preferred over G:C; G:U is preferred over G:C; and I:C is preferred over G:C (I=inosine). Mismatches, e.g., non-canonical or other than canonical pairings (as described elsewhere herein) are preferred over canonical (A:T, A:U, G:C) pairings; and pairings which include a universal base are preferred over canonical pairings.

[0238] In certain embodiments, the dsRNAi agent comprises at least one of the first 1, 2, 3, 4, or 5 base pairs within the duplex regions from the 5′-end of the antisense strand independently selected from the group of: A:U, G:U, I:C, and mismatched pairs, e.g., non-canonical or other than canonical pairings or pairings which include a universal base, to promote the dissociation of the antisense strand at the 5′-end of the duplex.

[0239] In certain embodiments, the nucleotide at the 1 position within the duplex region from the 5′-end in the antisense strand is selected from A, dA, dU, U, and dT. Alternatively, at least one of the first 1, 2, or 3 base pair within the duplex region from the 5′-end of the antisense strand is an AU base pair. For example, the first base pair within the duplex region from the 5′-end of the antisense strand is an AU base pair.

[0240] In other embodiments, the nucleotide at the 3′-end of the sense strand is deoxythimidine (dT) or the nucleotide at the 3′-end of the antisense strand is deoxythimidine (dT). For example, there is a short sequence of deoxythimidine nucleotides, for example, two dT nucleotides on the 3′-end of the sense, antisense strand, or both strands.

[0241] In certain embodiments, the sense strand sequence may be represented by formula (I):

5′nₚ-Nₐ-(X X X)ᵢ-N_{b}-Y Y Y-N_{b}-(Z Z Z)ⱼ-Nₐ-n_{q}3′ (I)
[0242] wherein:
[0243] i and j are each independently 0 or 1;
[0244] p and q are each independently 0-6;
[0245] each Nₐ independently represents an oligonucleotide sequence comprising 0-25 modified nucleotides, each sequence comprising at least two differently modified nucleotides;
[0246] each N_{b} independently represents an oligonucleotide sequence comprising 0-10 modified nucleotides;
[0247] each nₚ and n_{q} independently represent an overhang nucleotide;
[0248] wherein Nb and Y do not have the same modification; and XXX, YYY, and ZZZ each independently represent one motif of three identical modifications on three consecutive nucleotides. Preferably YYY is all 2′-F modified nucleotides.

[0249] In some embodiments, the Nₐ or N_{b} comprises modifications of alternating pattern.

[0250] In some embodiments, the YYY motif occurs at or near the cleavage site of the sense strand. For example, when the dsRNAi agent has a duplex region of 17-23 nucleotides in length, the YYY motif can occur at or the vicinity of the cleavage site (e.g.: can occur at positions 6, 7, 8; 7, 8, 9; 8, 9, 10; 9, 10, 11; 10, 11, 12; or 11, 12, 13) of the sense strand, the count starting from the first nucleotide, from the 5′-end; or optionally, the count starting at the first paired nucleotide within the duplex region, from the 5′-end.

[0251] In one embodiment, i is 1 and j is 0, or i is 0 and j is 1, or both i and j are 1. The sense strand can therefore be represented by the following formulas:

5′nₚ-Nₐ-YYY-N_{b}-ZZZ-Nₐ-n_{q}3′ (Ib);

5′nₚ-Nₐ-XXX-N_{b}-YYY-Nₐ-n_{q}3′ (Ic); or

5′nₚ-Nₐ-XXX-N_{b}-YYY-N_{b}-ZZZ-Nₐ-n_{q}3′ (Id).

[0252] When the sense strand is represented by formula (Ib), N_{b} represents an oligonucleotide sequence comprising 0-10, 0-7, 0-5, 0-4, 0-2, or 0 modified nucleotides. Each Nₐ independently can represent an oligonucleotide sequence comprising 2-20, 2-15, or 2-10 modified nucleotides.

[0253] When the sense strand is represented as formula (Ic), N_{b} represents an oligonucleotide sequence comprising 0-10, 0-7, 0-10, 0-7, 0-5, 0-4, 0-2, or 0 modified nucleotides. Each Nₐ can independently represent an oligonucleotide sequence comprising 2-20, 2-15, or 2-10 modified nucleotides.

[0254] When the sense strand is represented as formula (Id), each N_{b} independently represents an oligonucleotide sequence comprising 0-10, 0-7, 0-5, 0-4, 0-2, or 0 modified nucleotides. Preferably, N_{b} is 0, 1, 2, 3, 4, 5, or 6. Each Nₐ can independently represent an oligonucleotide sequence comprising 2-20, 2-15, or 2-10 modified nucleotides.

[0255] Each of X, Y and Z may be the same or different from each other.

[0256] In other embodiments, i is 0 and j is 0, and the sense strand may be represented by the formula:

5′nₚ-Nₐ-YYY-Nₐ-n_{q}3′ (Ia).

[0257] When the sense strand is represented by formula (Ia), each Nₐ independently can represent an oligonucleotide sequence comprising 2-20, 2-15, or 2-10 modified nucleotides.

[0258] In one embodiment, the antisense strand sequence of the RNAi may be represented by formula (II):

5′n_{q}′-Nₐ′-(Z′Z′Z′)ₖ-N_{b}′-Y′Y′Y′-N_{b}′-(X′X′X′)₁-N′ₐ-nₚ′3′ (II)
[0259] wherein:
[0260] k and 1 are each independently 0 or 1;
[0261] p′ and q′ are each independently 0-6;
[0262] each Nₐ′ independently represents an oligonucleotide sequence comprising 0-25 modified nucleotides, each sequence comprising at least two differently modified nucleotides;
[0263] each N_{b}′ independently represents an oligonucleotide sequence comprising 0-10 modified nucleotides;
[0264] each nₚ′ and n_{q}′ independently represent an overhang nucleotide;
[0265] wherein N_{b}′ and Y′ do not have the same modification; and
[0266] X′X′X′, Y′Y′Y′, and Z′Z′Z′ each independently represent one motif of three identical modifications on three consecutive nucleotides.

[0267] In some embodiments, the Nₐ′ or N_{b}′ comprises modifications of alternating pattern.

[0268] The Y′Y′Y′ motif occurs at or near the cleavage site of the antisense strand. For example, when the dsRNAi agent has a duplex region of 17-23 nucleotides in length, the Y′Y′Y′ motif can occur at positions 9, 10, 11; 10, 11, 12; 11, 12, 13; 12, 13, 14; or 13, 14, 15 of the antisense strand, with the count starting from the first nucleotide, from the 5′-end; or optionally, the count starting at the first paired nucleotide within the duplex region, from the 5′-end. Preferably, the Y′Y′Y′ motif occurs at positions 11, 12, 13.

[0269] In certain embodiments, Y′Y′Y′ motif is all 2′-OMe modified nucleotides.

[0270] In certain embodiments, k is 1 and 1 is 0, or k is 0 and 1 is 1, or both k and 1 are 1.

[0271] The antisense strand can therefore be represented by the following formulas:

5′n_{q}′-Nₐ′-Z′Z′Z′-N_{b}′-Y′Y′Y′-Nₐ′-n_{p′}3′ (IIb);

5′n_{q}′-Nₐ′-Y′Y′Y′-N_{b}′-X′X′X′-n_{p′}3′ (IIc); or

5′n_{q}′-Nₐ′-Z′Z′Z′-N_{b}′-Y′Y′Y′-N_{b}′-X′X′X′-Nₐ′-n_{p′}3′ (IId).

[0272] When the antisense strand is represented by formula (IIb), N_{b}′ represents an oligonucleotide sequence comprising 0-10, 0-7, 0-10, 0-7, 0-5, 0-4, 0-2, or 0 modified nucleotides. Each Nₐ′ independently represents an oligonucleotide sequence comprising 2-20, 2-15, or 2-10 modified nucleotides.

[0273] When the antisense strand is represented as formula (IIc), N_{b}′ represents an oligonucleotide sequence comprising 0-10, 0-7, 0-10, 0-7, 0-5, 0-4, 0-2, or 0 modified nucleotides. Each Nₐ′ independently represents an oligonucleotide sequence comprising 2-20, 2-15, or 2-10 modified nucleotides.

[0274] When the antisense strand is represented as formula (IId), each N_{b}′ independently represents an oligonucleotide sequence comprising 0-10, 0-7, 0-10, 0-7, 0-5, 0-4, 0-2, or 0 modified nucleotides. Each Nₐ′ independently represents an oligonucleotide sequence comprising 2-20, 2-15, or 2-10 modified nucleotides. Preferably, N_{b} is 0, 1, 2, 3, 4, 5, or 6.

[0275] In other embodiments, k is 0 and 1 is 0 and the antisense strand may be represented by the formula:

5′n_{p′}-Nₐ′-Y′Y′Y′-Nₐ′-n_{q′}3′ (Ia).

[0276] When the antisense strand is represented as formula (IIa), each Nₐ′ independently represents an oligonucleotide sequence comprising 2-20, 2-15, or 2-10 modified nucleotides.

[0277] Each of X′, Y′ and Z′ may be the same or different from each other.

[0278] Each nucleotide of the sense strand and antisense strand may be independently modified with CRN, UNA, cEt, LNA, glycol nucleic acid (GNA), hexitol nucleic acid (HNA), a cyclohexene nucleic acid (CeNA), 2′-methoxyethyl, 2′-O-methyl, 2′-O-allyl, 2′-C-allyl, 2′-hydroxyl, or 2′-fluoro. For example, each nucleotide of the sense strand and antisense strand is independently modified with 2′-O-methyl or 2′-fluoro. Each X, Y, Z, X′, Y′, and Z′, in particular, may represent a 2′-O-methyl modification or a 2′-fluoro modification.

[0279] In some embodiments, the sense strand of the dsRNAi agent may contain YYY motif occurring at 9, 10, and 11 positions of the strand when the duplex region is 21 nt, the count starting from the first nucleotide from the 5′-end, or optionally, the count starting at the first paired nucleotide within the duplex region, from the 5′-end; and Y represents 2′-F modification. The sense strand may additionally contain XXX motif or ZZZ motifs as wing modifications at the opposite end of the duplex region; and XXX and ZZZ each independently represents a 2′-OMe modification or 2′-F modification.

[0280] In some embodiments the antisense strand may contain Y′Y′Y′ motif occurring at positions 11, 12, 13 of the strand, the count starting from the first nucleotide from the 5′-end, or optionally, the count starting at the first paired nucleotide within the duplex region, from the 5′-end; and Y′ represents 2′-O-methyl modification. The antisense strand may additionally contain X′X′X′ motif or Z′Z′Z′ motifs as wing modifications at the opposite end of the duplex region; and X′X′X′ and Z′Z′Z′ each independently represents a 2′-OMe modification or 2′-F modification.

[0281] The sense strand represented by any one of the above formulas (Ia), (Ib), (Ic), and (Id) forms a duplex with an antisense strand being represented by any one of formulas (IIa), (IIb), (IIc), and (IId), respectively.

[0282] Accordingly, the dsRNAi agents for use in the methods of the invention may comprise a sense strand and an antisense strand, each strand having 14 to 30 nucleotides, the iRNA duplex represented by formula (III):

sense: 5′nₚ-Nₐ-(X X X)ᵢ-N_{b}-Y Y Y-N_{b}-(Z Z Z)ⱼ-Nₐ-n_{q}3′

antisense: 3′nₚ′-Nₐ′-(X′X′X′)ₖ-N_{b}′-Y′Y′Y′-N_{b}′-(Z′Z′Z′)₁-Nₐ′-n_{q}′5′ (III)
[0283] wherein:
[0284] i, j, k, and 1 are each independently 0 or 1;
[0285] p, p′, q, and q′ are each independently 0-6;
[0286] each Nₐ and Nₐ′ independently represents an oligonucleotide sequence comprising 0-25 modified nucleotides, each sequence comprising at least two differently modified nucleotides;
[0287] each N_{b} and N_{b}′ independently represents an oligonucleotide sequence comprising 0-10 modified nucleotides;
[0288] wherein each nₚ′, nₚ, n_{q}′, and n_{q}, each of which may or may not be present, independently represents an overhang nucleotide; and
[0289] XXX, YYY, ZZZ, X′X′X′, Y′Y′Y′, and Z′Z′Z′ each independently represent one motif of three identical modifications on three consecutive nucleotides.

[0290] In one embodiment, i is 0 and j is 0; or i is 1 and j is 0; or i is 0 and j is 1; or both i and j are 0; or both i and j are 1. In another embodiment, k is 0 and 1 is 0; or k is 1 and 1 is 0; k is 0 and 1 is 1; or both k and 1 are 0; or both k and 1 are 1.

[0291] Exemplary combinations of the sense strand and antisense strand forming an iRNA duplex include the formulas below:

5′nₚ-Nₐ-Y Y Y-Nₐ-n_{q}3′

3′nₚ′-Nₐ′-Y′Y′Y′-Nₐ′n_{q}′5′ (IIIa)

5′nₚ-Nₐ-Y Y Y-N_{b}-Z Z Z-Nₐ-n_{q}3′

3′nₚ′-Nₐ′-Y′Y′Y′-N_{b}′-Z′Z′Z′-Nₐ′n_{q}′5′ (IIb)

5′nₚ-Nₐ-X X X-N_{b}-Y Y Y-Nₐ-n_{q}3′

3′nₚ′-Nₐ′-X′X′X′-N_{b}′-Y′Y′Y′-Nₐ′-n_{q}′5′ (IIc)

5′nₚ-Nₐ-X X X-N_{b}-Y Y Y-N_{b}-Z Z Z-Nₐ-n_{q}3′

3′nₚ′-Nₐ′-X′X′X′-N_{b}′-Y′Y′Y′-N_{b}′-Z′Z′Z′-Nₐ-n_{q}′5′ (IIId)

[0292] When the dsRNAi agent is represented by formula (IIIa), each Nₐ independently represents an oligonucleotide sequence comprising 2-20, 2-15, or 2-10 modified nucleotides.

[0293] When the dsRNAi agent is represented by formula (IIIb), each N_{b} independently represents an oligonucleotide sequence comprising 1-10, 1-7, 1-5, or 1-4 modified nucleotides. Each Nₐ independently represents an oligonucleotide sequence comprising 2-20, 2-15, or 2-10 modified nucleotides.

[0294] When the dsRNAi agent is represented as formula (IIc), each N_{b}, N_{b}′ independently represents an oligonucleotide sequence comprising 0-10, 0-7, 0-10, 0-7, 0-5, 0-4, 0-2, or 0 modified nucleotides. Each Nₐ independently represents an oligonucleotide sequence comprising 2-20, 2-15, or 2-10 modified nucleotides.

[0295] When the dsRNAi agent is represented as formula (IIId), each N_{b}, N_{b}′ independently represents an oligonucleotide sequence comprising 0-10, 0-7, 0-10, 0-7, 0-5, 0-4, 0-2, or 0 modified nucleotides. Each Nₐ, Nₐ′ independently represents an oligonucleotide sequence comprising 2-20, 2-15, or 2-10 modified nucleotides. Each of Nₐ, Nₐ′, N_{b}, and N_{b}′ independently comprises modifications of alternating pattern.

[0296] Each of X, Y, and Z in formulas (III), (IIIa), (IIb), (IIc), and (IIId) may be the same or different from each other.

[0297] When the dsRNAi agent is represented by formula (III), (IIIa), (IIb), (IIc), and (IIId), at least one of the Y nucleotides may form a base pair with one of the Y′ nucleotides. Alternatively, at least two of the Y nucleotides form base pairs with the corresponding Y′ nucleotides; or all three of the Y nucleotides all form base pairs with the corresponding Y′ nucleotides.

[0298] When the dsRNAi agent is represented by formula (IIIb) or (IIId), at least one of the Z nucleotides may form a base pair with one of the Z′ nucleotides. Alternatively, at least two of the Z nucleotides form base pairs with the corresponding Z′ nucleotides; or all three of the Z nucleotides all form base pairs with the corresponding Z′ nucleotides.

[0299] When the dsRNAi agent is represented as formula (IIIc) or (IIId), at least one of the X nucleotides may form a base pair with one of the X′ nucleotides. Alternatively, at least two of the X nucleotides form base pairs with the corresponding X′ nucleotides; or all three of the X nucleotides all form base pairs with the corresponding X′ nucleotides.

[0300] In certain embodiments, the modification on the Y nucleotide is different than the modification on the Y′ nucleotide, the modification on the Z nucleotide is different than the modification on the Z′ nucleotide, or the modification on the X nucleotide is different than the modification on the X′ nucleotide.

[0301] In certain embodiments, when the dsRNAi agent is represented by formula (IIId), the Nₐ modifications are 2′-O-methyl or 2′-fluoro modifications. In other embodiments, when the RNAi agent is represented by formula (IIId), the Nₐ modifications are 2′-O-methyl or 2′-fluoro modifications and nₚ′>0 and at least one nₚ′ is linked to a neighboring nucleotide a via phosphorothioate linkage. In yet other embodiments, when the RNAi agent is represented by formula (IIId), the Nₐ modifications are 2′-O-methyl or 2′-fluoro modifications, nₚ′>0 and at least one nₚ′ is linked to a neighboring nucleotide via phosphorothioate linkage, and the sense strand is conjugated to one or more GalNAc derivatives attached through a bivalent or trivalent branched linker (described below). In other embodiments, when the RNAi agent is represented by formula (IIId), the Nₐ modifications are 2′-O-methyl or 2′-fluoro modifications, nₚ′>0 and at least one nₚ′ is linked to a neighboring nucleotide via phosphorothioate linkage, the sense strand comprises at least one phosphorothioate linkage, and the sense strand is conjugated to one or more GalNAc derivatives attached through a bivalent or trivalent branched linker.

[0302] In some embodiments, when the dsRNAi agent is represented by formula (IIIa), the Nₐ modifications are 2′-O-methyl or 2′-fluoro modifications, nₚ′>0 and at least one nₚ′ is linked to a neighboring nucleotide via phosphorothioate linkage, the sense strand comprises at least one phosphorothioate linkage, and the sense strand is conjugated to one or more GalNAc derivatives attached through a bivalent or trivalent branched linker.

[0303] In some embodiments, the dsRNAi agent is a multimer containing at least two duplexes represented by formula (III), (IIIa), (IIb), (IIc), and (IIId), wherein the duplexes are connected by a linker. The linker can be cleavable or non-cleavable. Optionally, the multimer further comprises a ligand. Each of the duplexes can target the same gene or two different genes; or each of the duplexes can target same gene at two different target sites.

[0304] In some embodiments, the dsRNAi agent is a multimer containing three, four, five, six, or more duplexes represented by formula (III), (IIIa), (IIb), (IIc), and (IIId), wherein the duplexes are connected by a linker. The linker can be cleavable or non-cleavable. Optionally, the multimer further comprises a ligand. Each of the duplexes can target the same gene or two different genes; or each of the duplexes can target same gene at two different target sites.

[0305] In one embodiment, two dsRNAi agents represented by at least one of formulas (III), (IIIa), (IIIb), (IIc), and (IIId) are linked to each other at the 5′ end, and one or both of the 3′ ends, and are optionally conjugated to a ligand. Each of the agents can target the same gene or two different genes; or each of the agents can target same gene at two different target sites.

[0306] In certain embodiments, an RNAi agent of the invention may contain a low number of nucleotides containing a 2′-fluoro modification, e.g., 10 or fewer nucleotides with 2′-fluoro modification. For example, the RNAi agent may contain 10, 9, 8, 7, 6, 5, 4, 3, 2, 1 or 0 nucleotides with a 2′-fluoro modification. In a specific embodiment, the RNAi agent of the invention contains 10 nucleotides with a 2′-fluoro modification, e.g., 4 nucleotides with a 2′-fluoro modification in the sense strand and 6 nucleotides with a 2′-fluoro modification in the antisense strand. In another specific embodiment, the RNAi agent of the invention contains 6 nucleotides with a 2′-fluoro modification, e.g., 4 nucleotides with a 2′-fluoro modification in the sense strand and 2 nucleotides with a 2′-fluoro modification in the antisense strand.

[0307] In other embodiments, an RNAi agent of the invention may contain an ultra low number of nucleotides containing a 2′-fluoro modification, e.g., 2 or fewer nucleotides containing a 2′-fluoro modification. For example, the RNAi agent may contain 2, 1 of 0 nucleotides with a 2′-fluoro modification. In a specific embodiment, the RNAi agent may contain 2 nucleotides with a 2′-fluoro modification, e.g., 0 nucleotides with a 2-fluoro modification in the sense strand and 2 nucleotides with a 2′-fluoro modification in the antisense strand.

[0308] Various publications describe multimeric iRNAs that can be used in the methods of the invention. Such publications include WO2007/091269, U.S. Pat. No. 7,858,769, WO2010/141511, WO2007/117686, WO2009/014887, and WO2011/031520 the entire contents of each of which are hereby incorporated herein by reference.

[0309] In certain embodiments, the compositions and methods of the disclosure include a vinyl phosphonate (VP) modification of an RNAi agent as described herein. In exemplary embodiments, a 5′-vinyl phosphonate modified nucleotide of the disclosure has the structure:

[chemical structure]

[0310] wherein X is O or S;
[0311] R is hydrogen, hydroxy, fluoro, or C₁₋₂₀alkoxy (e.g., methoxy or n-hexadecyloxy);
[0312] R^{5′} is ═C(H)—P(O)(OH)₂ and the double bond between the C5′ carbon and R5′ is in the E or Z orientation (e.g., E orientation); and
[0313] B is a nucleobase or a modified nucleobase, optionally where B is adenine, guanine, cytosine, thymine, or uracil.

[0314] A vinyl phosphonate of the instant disclosure may be attached to either the antisense or the sense strand of a dsRNA of the disclosure. In certain preferred embodiments, a vinyl phosphonate of the instant disclosure is attached to the antisense strand of a dsRNA, optionally at the 5′ end of the antisense strand of the dsRNA.

[0315] Vinyl phosphate modifications are also contemplated for the compositions and methods of the instant disclosure. An exemplary vinyl phosphate structure includes the preceding structure, where R5′ is ═C(H)—OP(O)(OH)2 and the double bond between the C5′ carbon and R5′ is in the E or Z orientation (e.g., E orientation).

[0316] As described in more detail below, the iRNA that contains conjugations of one or more carbohydrate moieties to an iRNA can optimize one or more properties of the iRNA. In many cases, the carbohydrate moiety will be attached to a modified subunit of the iRNA. For example, the ribose sugar of one or more ribonucleotide subunits of an iRNA can be replaced with another moiety, e.g., a non-carbohydrate (preferably cyclic) carrier to which is attached a carbohydrate ligand. A ribonucleotide subunit in which the ribose sugar of the subunit has been so replaced is referred to herein as a ribose replacement modification subunit (RRMS). A cyclic carrier may be a carbocyclic ring system, i.e., all ring atoms are carbon atoms, or a heterocyclic ring system, i.e., one or more ring atoms may be a heteroatom, e.g., nitrogen, oxygen, sulfur. The cyclic carrier may be a monocyclic ring system, or may contain two or more rings, e.g. fused rings. The cyclic carrier may be a fully saturated ring system, or it may contain one or more double bonds.

[0317] The ligand may be attached to the polynucleotide via a carrier. The carriers include (i) at least one “backbone attachment point,” preferably two “backbone attachment points” and (ii) at least one “tethering attachment point.” A “backbone attachment point” as used herein refers to a functional group, e.g. a hydroxyl group, or generally, a bond available for, and that is suitable for incorporation of the carrier into the backbone, e.g., the phosphate, or modified phosphate, e.g., sulfur containing, backbone, of a ribonucleic acid. A “tethering attachment point” (TAP) in some embodiments refers to a constituent ring atom of the cyclic carrier, e.g., a carbon atom or a heteroatom (distinct from an atom which provides a backbone attachment point), that connects a selected moiety. The moiety can be, e.g., a carbohydrate, e.g. monosaccharide, disaccharide, trisaccharide, tetrasaccharide, oligosaccharide, or polysaccharide. Optionally, the selected moiety is connected by an intervening tether to the cyclic carrier. Thus, the cyclic carrier will often include a functional group, e.g., an amino group, or generally, provide a bond, that is suitable for incorporation or tethering of another chemical entity, e.g., a ligand to the constituent ring.

[0318] The iRNA may be conjugated to a ligand via a carrier, wherein the carrier can be cyclic group or acyclic group; preferably, the cyclic group is selected from pyrrolidinyl, pyrazolinyl, pyrazolidinyl, imidazolinyl, imidazolidinyl, piperidinyl, piperazinyl, [1,3]dioxolane, oxazolidinyl, isoxazolidinyl, morpholinyl, thiazolidinyl, isothiazolidinyl, quinoxalinyl, pyridazinonyl, tetrahydrofuryl, and decalin; preferably, the acyclic group is a serinol backbone or diethanolamine backbone.

[0319] i. Thermally Destabilizing Modifications

[0320] In certain embodiments, a dsRNA molecule can be optimized for RNA interference by incorporating thermally destabilizing modifications in the seed region of the antisense strand. As used herein “seed region” means at positions 2-9 of the 5′-end of the referenced strand. For example, thermally destabilizing modifications can be incorporated in the seed region of the antisense strand to reduce or inhibit off-target gene silencing.

[0321] The term “thermally destabilizing modification(s)” includes modification(s) that would result with a dsRNA with a lower overall melting temperature (Tm) than the Tm of the dsRNA without having such modification(s). For example, the thermally destabilizing modification(s) can decrease the Tm of the dsRNA by 1-4° C., such as one, two, three or four degrees Celcius. And, the term “thermally destabilizing nucleotide” refers to a nucleotide containing one or more thermally destabilizing modifications. It has been discovered that dsRNAs with an antisense strand comprising at least one thermally destabilizing modification of the duplex within the first 9 nucleotide positions, counting from the 5′ end, of the antisense strand have reduced off-target gene silencing activity. Accordingly, in some embodiments, the antisense strand comprises at least one (e.g., one, two, three, four, five or more) thermally destabilizing modification of the duplex within the first 9 nucleotide positions of the 5′ region of the antisense strand. In some embodiments, one or more thermally destabilizing modification(s) of the duplex is/are located in positions 2-9, or preferably positions 4-8, from the 5′-end of the antisense strand. In some further embodiments, the thermally destabilizing modification(s) of the duplex is/are located at position 6, 7 or 8 from the 5′-end of the antisense strand. In still some further embodiments, the thermally destabilizing modification of the duplex is located at position 7 from the 5′-end of the antisense strand. In some embodiments, the thermally destabilizing modification of the duplex is located at position 2, 3, 4, 5 or 9 from the 5′-end of the antisense strand.

[0322] An iRNA agent comprises a sense strand and an antisense strand, each strand having 14 to 40 nucleotides. The RNAi agent may be represented by formula (L):

[chemical structure]

In formula (L), B1, B2, B3, B1′, B2′, B3′, and B4′ each are independently a nucleotide containing a modification selected from the group consisting of 2′-O-alkyl, 2′-substituted alkoxy, 2′-substituted alkyl, 2′-halo, ENA, and BNA/LNA. In one embodiment, B1, B2, B3, B1′, B2′, B3′, and B4′ each contain 2′-OMe modifications. In one embodiment, B1, B2, B3, B1′, B2′, B3′, and B4′ each contain 2′-OMe or 2′-F modifications. In one embodiment, at least one of Bi, B2, B3, B1′, B2′, B3′, and B4′ contain 2′-O-N-methylacetamido (2′-O-NMA) modification.

[0323] C1 is a thermally destabilizing nucleotide placed at a site opposite to the seed region of the antisense strand (i.e., at positions 2-8 of the 5′-end of the antisense strand). For example, C1 is at a position of the sense strand that pairs with a nucleotide at positions 2-8 of the 5′-end of the antisense strand. In one example, C1 is at position 15 from the 5′-end of the sense strand. C1 nucleotide bears the thermally destabilizing modification which can include abasic modification; mismatch with the opposing nucleotide in the duplex; and sugar modification such as 2′-deoxy modification or acyclic nucleotide e.g., unlocked nucleic acids (UNA) or glycerol nucleic acid (GNA). In one embodiment, C1 has thermally destabilizing modification selected from the group consisting of: i) mismatch with the opposing nucleotide in the antisense strand; ii) abasic modification selected from the group consisting of:

[chemical structure]

and iii) sugar modification selected from the group consisting of:

[chemical structure]

wherein B is a modified or unmodified nucleobase, R¹ and R² independently are H, halogen, OR₃, or alkyl; and R₃ is H, alkyl, cycloalkyl, aryl, aralkyl, heteroaryl or sugar. In one embodiment, the thermally destabilizing modification in C1 is a mismatch selected from the group consisting of G:G, G:A, G:U, G:T, A:A, A:C, C:C, C:U, C:T, U:U, T:T, and U:T; and optionally, at least one nucleobase in the mismatch pair is a 2′-deoxy nucleobase. In one example, the thermally destabilizing modification in C1 is GNA or

[chemical structure]

T1, T1′, T2′, and T3′ each independently represent a nucleotide comprising a modification providing the nucleotide a steric bulk that is less or equal to the steric bulk of a 2′-OMe modification. A steric bulk refers to the sum of steric effects of a modification. Methods for determining steric effects of a modification of a nucleotide are known to one skilled in the art. The modification can be at the 2′ position of a ribose sugar of the nucleotide, or a modification to a non-ribose nucleotide, acyclic nucleotide, or the backbone of the nucleotide that is similar or equivalent to the 2′ position of the ribose sugar, and provides the nucleotide a steric bulk that is less than or equal to the steric bulk of a 2′-OMe modification. For example, T1, T1′, T2′, and T3′ are each independently selected from DNA, RNA, LNA, 2′-F, and 2′-F-5′-methyl. In one embodiment, T1 is DNA. In one embodiment, T1′ is DNA, RNA or LNA. In one embodiment, T2′ is DNA or RNA. In one embodiment, T3′ is DNA or RNA.
[0324] n¹, n³, and q¹ are independently 4 to 15 nucleotides in length.
[0325] n⁵, q³, and q⁷ are independently 1-6 nucleotide(s) in length.
[0326] n⁴, q², and q⁶ are independently 1-3 nucleotide(s) in length; alternatively, n⁴ is 0.
[0327] q⁵ is independently 0-10 nucleotide(s) in length.
[0328] n² and q⁴ are independently 0-3 nucleotide(s) in length.

[0329] Alternatively, n⁴ is 0-3 nucleotide(s) in length.

[0330] In one embodiment, n⁴ can be 0. In one example, n⁴ is 0, and q² and q⁶ are 1. In another example, n⁴ is 0, and q² and q⁶ are 1, with two phosphorothioate internucleotide linkage modifications within position 1-5 of the sense strand (counting from the 5′-end of the sense strand), and two phosphorothioate internucleotide linkage modifications at positions 1 and 2 and two phosphorothioate internucleotide linkage modifications within positions 18-23 of the antisense strand (counting from the 5′-end of the antisense strand).

[0331] In one embodiment, n⁴, q², and q⁶ are each 1.

[0332] In one embodiment, n², n⁴, q², q⁴, and q⁶ are each 1.

[0333] In one embodiment, C1 is at position 14-17 of the 5′-end of the sense strand, when the sense strand is 19-22 nucleotides in length, and n⁴ is 1. In one embodiment, C1 is at position 15 of the 5′-end of the sense strand

[0334] In one embodiment, T3′ starts at position 2 from the 5′ end of the antisense strand. In one example, T3′ is at position 2 from the 5′ end of the antisense strand and q⁶ is equal to 1.

[0335] In one embodiment, T1′ starts at position 14 from the 5′ end of the antisense strand. In one example, T1′ is at position 14 from the 5′ end of the antisense strand and q² is equal to 1.

[0336] In an exemplary embodiment, T3′ starts from position 2 from the 5′ end of the antisense strand and T1′ starts from position 14 from the 5′ end of the antisense strand. In one example, T3′ starts from position 2 from the 5′ end of the antisense strand and q⁶ is equal to 1 and T1′ starts from position 14 from the 5′ end of the antisense strand and q² is equal to 1.

[0337] In one embodiment, T1′ and T3′ are separated by 11 nucleotides in length (i.e. not counting the T1′ and T3′ nucleotides).

[0338] In one embodiment, T1′ is at position 14 from the 5′ end of the antisense strand. In one example, T1′ is at position 14 from the 5′ end of the antisense strand and q² is equal to 1, and the modification at the 2′ position or positions in a non-ribose, acyclic or backbone that provide less steric bulk than a 2′-OMe ribose.

[0339] In one embodiment, T3′ is at position 2 from the 5′ end of the antisense strand. In one example, T3′ is at position 2 from the 5′ end of the antisense strand and q⁶ is equal to 1, and the modification at the 2′ position or positions in a non-ribose, acyclic or backbone that provide less than or equal to steric bulk than a 2′-OMe ribose.

[0340] In one embodiment, T1 is at the cleavage site of the sense strand. In one example, T1 is at position 11 from the 5′ end of the sense strand, when the sense strand is 19-22 nucleotides in length, and n² is 1. In an exemplary embodiment, T1 is at the cleavage site of the sense strand at position 11 from the 5′ end of the sense strand, when the sense strand is 19-22 nucleotides in length, and n² is 1,

[0341] In one embodiment, T2′ starts at position 6 from the 5′ end of the antisense strand. In one example, T2′ is at positions 6-10 from the 5′ end of the antisense strand, and q⁴ is 1.

[0342] In an exemplary embodiment, T1 is at the cleavage site of the sense strand, for instance, at position 11 from the 5′ end of the sense strand, when the sense strand is 19-22 nucleotides in length, and n² is 1; T1′ is at position 14 from the 5′ end of the antisense strand, and q² is equal to 1, and the modification to T1′ is at the 2′ position of a ribose sugar or at positions in a non-ribose, acyclic or backbone that provide less steric bulk than a 2′-OMe ribose; T2′ is at positions 6-10 from the 5′ end of the antisense strand, and q⁴ is 1; and T3′ is at position 2 from the 5′ end of the antisense strand, and q⁶ is equal to 1, and the modification to T3′ is at the 2′ position or at positions in a non-ribose, acyclic or backbone that provide less than or equal to steric bulk than a 2′-OMe ribose. In one embodiment, T2′ starts at position 8 from the 5′ end of the antisense strand. In one example, T2′ starts at position 8 from the 5′ end of the antisense strand, and q⁴ is 2.

[0343] In one embodiment, T2′ starts at position 9 from the 5′ end of the antisense strand. In one example, T2′ is at position 9 from the 5′ end of the antisense strand, and q⁴ is 1.

[0344] In one embodiment, B1′ is 2′-OMe or 2′-F, q¹ is 9, T1′ is 2′-F, q² is 1, B2′ is 2′-OMe or 2′-F, q³ is 4, T2′ is 2′-F, q⁴ is 1, B3′ is 2′-OMe or 2′-F, q⁵ is 6, T3′ is 2′-F, q⁶ is 1, B4′ is 2′-OMe, and q⁷ is 1; with two phosphorothioate internucleotide linkage modifications within positions 1-5 of the sense strand (counting from the 5′-end of the sense strand), and two phosphorothioate internucleotide linkage modifications at positions 1 and 2 and two phosphorothioate internucleotide linkage modifications within positions 18-23 of the antisense strand (counting from the 5′-end of the antisense strand).

[0345] In one embodiment, n⁴ is 0, B3 is 2′-OMe, n⁵ is 3, B1′ is 2′-OMe or 2′-F, q¹ is 9, T1′ is 2′-F, q² is 1, B2′ is 2′-OMe or 2′-F, q³ is 4, T2′ is 2′-F, q⁴ is 1, B3′ is 2′-OMe or 2′-F, q⁵ is 6, T3′ is 2′-F, q⁶ is 1, B4′ is 2′-OMe, and q⁷ is 1; with two phosphorothioate internucleotide linkage modifications within positions 1-5 of the sense strand (counting from the 5′-end of the sense strand), and two phosphorothioate internucleotide linkage modifications at positions 1 and 2 and two phosphorothioate internucleotide linkage modifications within positions 18-23 of the antisense strand (counting from the 5′-end of the antisense strand).

[0346] In one embodiment, B1 is 2′-OMe or 2′-F, n¹ is 8, T1 is 2′F, n² is 3, B2 is 2′-OMe, n³ is 7, n⁴ is 0, B3 is 2′OMe, n⁵ is 3, B1′ is 2′-OMe or 2′-F, q¹ is 9, T1′ is 2′-F, q² is 1, B2′ is 2′-OMe or 2′-F, q3 is 4, T2′ is 2′-F, q⁴ is 2, B3′ is 2′-OMe or 2′-F, q⁵ is 5, T3′ is 2′-F, q⁶ is 1, B4′ is 2′-OMe, and q⁷ is 1.

[0347] In one embodiment, B1 is 2′-OMe or 2′-F, n¹ is 8, T1 is 2′F, n² is 3, B2 is 2′-OMe, n³ is 7, n⁴ is 0, B3 is 2′-OMe, n⁵ is 3, B1′ is 2′-OMe or 2′-F, q¹ is 9, T1′ is 2′-F, q² is 1, B2′ is 2′-OMe or 2′-F, q³ is 4, T2′ is 2′-F, q⁴ is 2, B3′ is 2′-OMe or 2′-F, q⁵ is 5, T3′ is 2′-F, q⁶ is 1, B4′ is 2′-OMe, and q⁷ is 1; with two phosphorothioate internucleotide linkage modifications within positions 1-5 of the sense strand (counting from the 5′-end of the sense strand), and two phosphorothioate internucleotide linkage modifications at positions 1 and 2 and two phosphorothioate internucleotide linkage modifications within positions 18-23 of the antisense strand (counting from the 5′-end of the antisense strand).

[0348] In one embodiment, B1 is 2′-OMe or 2′-F, n¹ is 6, T1 is 2′F, n² is 3, B2 is 2′-OMe, n³ is 7, n⁴ is 0, B3 is 2′OMe, n⁵ is 3, B1′ is 2′-OMe or 2′-F, q¹ is 7, T1′ is 2′-F, q² is 1, B2′ is 2′-OMe or 2′-F, q³ is 4, T2′ is 2′-F, q⁴ is 2, B3′ is 2′-OMe or 2′-F, q⁵ is 5, T3′ is 2′-F, q⁶ is 1, B4′ is 2′-OMe, and q⁷ is 1.

[0349] In one embodiment, B1 is 2′-OMe or 2′-F, n¹ is 6, T1 is 2′F, n² is 3, B2 is 2′-OMe, n³ is 7, n⁴ is 0, B3 is 2′-OMe, n⁵ is 3, B1′ is 2′-OMe or 2′-F, q¹ is 7, T1′ is 2′-F, q² is 1, B2′ is 2′-OMe or 2′-F, q³ is 4, T2′ is 2′-F, q⁴ is 2, B3′ is 2′-OMe or 2′-F, q⁵ is 5, T3′ is 2′-F, q⁶ is 1, B4′ is 2′-OMe, and q⁷ is 1; with two phosphorothioate internucleotide linkage modifications within positions 1-5 of the sense strand (counting from the 5′-end of the sense strand), and two phosphorothioate internucleotide linkage modifications at positions 1 and 2 and two phosphorothioate internucleotide linkage modifications within positions 18-23 of the antisense strand (counting from the 5′-end of the antisense strand).

[0350] In one embodiment, B1 is 2′-OMe or 2′-F, n¹ is 8, T1 is 2′F, n² is 3, B2 is 2′-OMe, n³ is 7, n⁴ is 0, B3 is 2′OMe, n⁵ is 3, B1′ is 2′-OMe or 2′-F, q¹ is 9, T1′ is 2′-F, q² is 1, B2′ is 2′-OMe or 2′-F, q³ is 4, T2′ is 2′-F, q⁴ is 1, B3′ is 2′-OMe or 2′-F, q⁵ is 6, T3′ is 2′-F, q⁶ is 1, B4′ is 2′-OMe, and q⁷ is 1.

[0351] In one embodiment, B1 is 2′-OMe or 2′-F, n¹ is 8, T1 is 2′F, n² is 3, B2 is 2′-OMe, n³ is 7, n⁴ is 0, B3 is 2′-OMe, n⁵ is 3, B1′ is 2′-OMe or 2′-F, q¹ is 9, T1′ is 2′-F, q² is 1, B2′ is 2′-OMe or 2′-F, q³ is 4, T2′ is 2′-F, q⁴ is 1, B3′ is 2′-OMe or 2′-F, q⁵ is 6, T3′ is 2′-F, q⁶ is 1, B4′ is 2′-OMe, and q⁷ is 1; with two phosphorothioate internucleotide linkage modifications within positions 1-5 of the sense strand (counting from the 5′-end of the sense strand), and two phosphorothioate internucleotide linkage modifications at positions 1 and 2 and two phosphorothioate internucleotide linkage modifications within positions 18-23 of the antisense strand (counting from the 5′-end of the antisense strand).

[0352] In one embodiment, B1 is 2′-OMe or 2′-F, n¹ is 8, T1 is 2′F, n² is 3, B2 is 2′-OMe, n³ is 7, n⁴ is 0, B3 is 2′OMe, n⁵ is 3, B1′ is 2′-OMe or 2′-F, q¹ is 9, T1′ is 2′-F, q² is 1, B2′ is 2′-OMe or 2′-F, q³ is 5, T2′ is 2′-F, q⁴ is 1, B3′ is 2′-OMe or 2′-F, q⁵ is 5, T3′ is 2′-F, q⁶ is 1, B4′ is 2′-OMe, and q⁷ is 1; optionally with at least 2 additional TT at the 3′-end of the antisense strand.

[0353] In one embodiment, B1 is 2′-OMe or 2′-F, n¹ is 8, T1 is 2′F, n² is 3, B2 is 2′-OMe, n³ is 7, n⁴ is 0, B3 is 2′-OMe, n⁵ is 3, B1′ is 2′-OMe or 2′-F, q¹ is 9, T1′ is 2′-F, q² is 1, B2′ is 2′-OMe or 2′-F, q³ is 5, T2′ is 2′-F, q⁴ is 1, B3′ is 2′-OMe or 2′-F, q⁵ is 5, T3′ is 2′-F, q⁶ is 1, B4′ is 2′-OMe, and q⁷ is 1; optionally with at least 2 additional TT at the 3′-end of the antisense strand; with two phosphorothioate internucleotide linkage modifications within positions 1-5 of the sense strand (counting from the 5′-end of the sense strand), and two phosphorothioate internucleotide linkage modifications at positions 1 and 2 and two phosphorothioate internucleotide linkage modifications within positions 18-23 of the antisense strand (counting from the 5′-end of the antisense strand).

[0354] In one embodiment, B1 is 2′-OMe or 2′-F, n¹ is 8, T1 is 2′F, n² is 3, B2 is 2′-OMe, n³ is 7, n⁴ is 0, B3 is 2′-OMe, n⁵ is 3, B1′ is 2′-OMe or 2′-F, q¹ is 9, T1′ is 2′-F, q² is 1, B2′ is 2′-OMe or 2′-F, q³ is 4, q⁴ is 0, B3′ is 2′-OMe or 2′-F, q⁵ is 7, T3′ is 2′-F, q⁶ is 1, B4′ is 2′-OMe, and q⁷ is 1.

[0355] In one embodiment, B1 is 2′-OMe or 2′-F, n¹ is 8, T1 is 2′F, n² is 3, B2 is 2′-OMe, n³ is 7, n⁴ is 0, B3 is 2′-OMe, n⁵ is 3, B1′ is 2′-OMe or 2′-F, q¹ is 9, T1′ is 2′-F, q² is 1, B2′ is 2′-OMe or 2′-F, q³ is 4, q⁴ is 0, B3′ is 2′-OMe or 2′-F, q⁵ is 7, T3′ is 2′-F, q⁶ is 1, B4′ is 2′-OMe, and q⁷ is 1; with two phosphorothioate internucleotide linkage modifications within positions 1-5 of the sense strand (counting from the 5′-end), and two phosphorothioate internucleotide linkage modifications at positions 1 and 2 and two phosphorothioate internucleotide linkage modifications within positions 18-23 of the antisense strand (counting from the 5′-end).

[0356] In one embodiment, B1 is 2′-OMe or 2′-F, n¹ is 8, T1 is 2′F, n² is 3, B2 is 2′-OMe, n³ is 7, n⁴ is 0, B3 is 2′OMe, n⁵ is 3, B1′ is 2′-OMe or 2′-F, q¹ is 9, T1′ is 2′-F, q² is 1, B2′ is 2′-OMe or 2′-F, q³ is 4, T2′ is 2′-F, q⁴ is 2, B3′ is 2′-OMe or 2′-F, q⁵ is 5, T3′ is 2′-F, q⁶ is 1, B4′ is 2′-F, and q⁷ is 1.

[0357] In one embodiment, B1 is 2′-OMe or 2′-F, n¹ is 8, T1 is 2′F, n² is 3, B2 is 2′-OMe, n³ is 7, n⁴ is 0, B3 is 2′-OMe, n⁵ is 3, B1′ is 2′-OMe or 2′-F, q¹ is 9, T1′ is 2′-F, q² is 1, B2′ is 2′-OMe or 2′-F, q³ is 4, T2′ is 2′-F, q⁴ is 2, B3′ is 2′-OMe or 2′-F, q⁵ is 5, T3′ is 2′-F, q⁶ is 1, B4′ is 2′-F, and q⁷ is 1; with two phosphorothioate internucleotide linkage modifications within positions 1-5 of the sense strand (counting from the 5′-end of the sense strand), and two phosphorothioate internucleotide linkage modifications at positions 1 and 2 and two phosphorothioate internucleotide linkage modifications within positions 18-23 of the antisense strand (counting from the 5′-end of the antisense strand).

[0358] In one embodiment, B1 is 2′-OMe or 2′-F, n¹ is 8, T1 is 2′F, n² is 3, B2 is 2′-OMe, n³ is 7, n⁴ is 0, B3 is 2′-OMe, n⁵ is 3, B1′ is 2′-OMe or 2′-F, q¹ is 9, T1′ is 2′-F, q² is 1, B2′ is 2′-OMe or 2′-F, q³ is 4, q⁴ is 0, B3′ is 2′-OMe or 2′-F, q⁵ is 7, T3′ is 2′-F, q⁶ is 1, B4′ is 2′-F, and q⁷ is 1.

[0359] In one embodiment, B1 is 2′-OMe or 2′-F, n¹ is 8, T1 is 2′F, n² is 3, B2 is 2′-OMe, n³ is 7, n⁴ is 0, B3 is 2′-OMe, n⁵ is 3, B1′ is 2′-OMe or 2′-F, q¹ is 9, T1′ is 2′-F, q² is 1, B2′ is 2′-OMe or 2′-F, q³ is 4, q⁴ is 0, B3′ is 2′-OMe or 2′-F, q⁵ is 7, T3′ is 2′-F, q⁶ is 1, B4′ is 2′-F, and q⁷ is 1; with two phosphorothioate internucleotide linkage modifications within positions 1-5 of the sense strand (counting from the 5′-end of the sense strand), and two phosphorothioate internucleotide linkage modifications at positions 1 and 2 and two phosphorothioate internucleotide linkage modifications within positions 18-23 of the antisense strand (counting from the 5′-end of the antisense strand).

[0360] The RNAi agent can comprise a phosphorus-containing group at the 5′-end of the sense strand or antisense strand. The 5′-end phosphorus-containing group can be 5′-end phosphate (5′-P), 5′-end phosphorothioate (5′-PS), 5′-end phosphorodithioate (5′-PS₂), 5′-end vinylphosphonate (5′-VP), 5′-end methylphosphonate (MePhos), or 5′-deoxy-5′-C-malonyl

[chemical structure]

When the 5′-end phosphorus-containing group is 5′-end vinylphosphonate (5′-VP), the 5′-VP can be either 5′-E-VP isomer (i.e., trans-vinylphosphate,

[chemical structure]

5′-Z-VP isomer (i.e., cis-vinylphosphate,

[chemical structure]

or mixtures thereof.

[0361] In one embodiment, the RNAi agent comprises a phosphorus-containing group at the 5′-end of the sense strand. In one embodiment, the RNAi agent comprises a phosphorus-containing group at the 5′-end of the antisense strand.

[0362] In one embodiment, the RNAi agent comprises a 5′-P. In one embodiment, the RNAi agent comprises a 5′-P in the antisense strand.

[0363] In one embodiment, the RNAi agent comprises a 5′-PS. In one embodiment, the RNAi agent comprises a 5′-PS in the antisense strand.

[0364] In one embodiment, the RNAi agent comprises a 5′-VP. In one embodiment, the RNAi agent comprises a 5′-VP in the antisense strand. In one embodiment, the RNAi agent comprises a 5′-E-VP in the antisense strand. In one embodiment, the RNAi agent comprises a 5′-Z-VP in the antisense strand.

[0365] In one embodiment, the RNAi agent comprises a 5′-PS₂. In one embodiment, the RNAi agent comprises a 5′-PS₂ in the antisense strand.

[0366] In one embodiment, the RNAi agent comprises a 5′-PS₂. In one embodiment, the RNAi agent comprises a 5′-deoxy-5′-C-malonyl in the antisense strand.

[0367] In one embodiment, B1 is 2′-OMe or 2′-F, n¹ is 8, T1 is 2′F, n² is 3, B2 is 2′-OMe, n³ is 7, n⁴ is 0, B3 is 2′OMe, n⁵ is 3, B1′ is 2′-OMe or 2′-F, q¹ is 9, T1′ is 2′-F, q² is 1, B2′ is 2′-OMe or 2′-F, q³ is 4, T2′ is 2′-F, q⁴ is 2, B3′ is 2′-OMe or 2′-F, q⁵ is 5, T3′ is 2′-F, q⁶ is 1, B4′ is 2′-OMe, and q⁷ is 1. The RNAi agent also comprises a 5′-PS.

[0368] In one embodiment, B1 is 2′-OMe or 2′-F, n¹ is 8, T1 is 2′F, n² is 3, B2 is 2′-OMe, n³ is 7, n⁴ is 0, B3 is 2′OMe, n⁵ is 3, B1′ is 2′-OMe or 2′-F, q¹ is 9, T1′ is 2′-F, q² is 1, B2′ is 2′-OMe or 2′-F, q³ is 4, T2′ is 2′-F, q⁴ is 2, B3′ is 2′-OMe or 2′-F, q⁵ is 5, T3′ is 2′-F, q⁶ is 1, B4′ is 2′-OMe, and q⁷ is 1. The RNAi agent also comprises a 5′-P.

[0369] In one embodiment, B1 is 2′-OMe or 2′-F, n¹ is 8, T1 is 2′F, n² is 3, B2 is 2′-OMe, n³ is 7, n⁴ is 0, B3 is 2′OMe, n⁵ is 3, B1′ is 2′-OMe or 2′-F, q¹ is 9, T1′ is 2′-F, q² is 1, B2′ is 2′-OMe or 2′-F, q³ is 4, T2′ is 2′-F, q⁴ is 2, B3′ is 2′-OMe or 2′-F, q⁵ is 5, T3′ is 2′-F, q⁶ is 1, B4′ is 2′-OMe, and q⁷ is 1. The RNAi agent also comprises a 5′-VP. The 5′-VP may be 5′-E-VP, 5′-Z-VP, or combination thereof.

[0370] In one embodiment, B1 is 2′-OMe or 2′-F, n¹ is 8, T1 is 2′F, n² is 3, B2 is 2′-OMe, n³ is 7, n⁴ is 0, B3 is 2′OMe, n⁵ is 3, B1′ is 2′-OMe or 2′-F, q¹ is 9, T1′ is 2′-F, q² is 1, B2′ is 2′-OMe or 2′-F, q³ is 4, T2′ is 2′-F, q⁴ is 2, B3′ is 2′-OMe or 2′-F, q⁵ is 5, T3′ is 2′-F, q⁶ is 1, B4′ is 2′-OMe, and q⁷ is 1. The RNAi agent also comprises a 5′-PS₂.

[0371] In one embodiment, B1 is 2′-OMe or 2′-F, n¹ is 8, T1 is 2′F, n² is 3, B2 is 2′-OMe, n³ is 7, n⁴ is 0, B3 is 2′OMe, n⁵ is 3, B1′ is 2′-OMe or 2′-F, q¹ is 9, T1′ is 2′-F, q² is 1, B2′ is 2′-OMe or 2′-F, q³ is 4, T2′ is 2′-F, q⁴ is 2, B3′ is 2′-OMe or 2′-F, q⁵ is 5, T3′ is 2′-F, q⁶ is 1, B4′ is 2′-OMe, and q⁷ is 1. The RNAi agent also comprises a 5′-deoxy-5′-C-malonyl.

[0372] In one embodiment, B1 is 2′-OMe or 2′-F, n¹ is 8, T1 is 2′F, n² is 3, B2 is 2′-OMe, n³ is 7, n⁴ is 0, B3 is 2′-OMe, n⁵ is 3, B1′ is 2′-OMe or 2′-F, q¹ is 9, T1′ is 2′-F, q² is 1, B2′ is 2′-OMe or 2′-F, q³ is 4, T2′ is 2′-F, q⁴ is 2, B3′ is 2′-OMe or 2′-F, q⁵ is 5, T3′ is 2′-F, q⁶ is 1, B4′ is 2′-OMe, and q⁷ is 1; with two phosphorothioate internucleotide linkage modifications within position 1-5 of the sense strand (counting from the 5′-end of the sense strand), and two phosphorothioate internucleotide linkage modifications at positions 1 and 2 and two phosphorothioate internucleotide linkage modifications within positions 18-23 of the antisense strand (counting from the 5′-end of the antisense strand). The RNAi agent also comprises a 5′-P.

[0373] In one embodiment, B1 is 2′-OMe or 2′-F, n¹ is 8, T1 is 2′F, n² is 3, B2 is 2′-OMe, n³ is 7, n⁴ is 0, B3 is 2′-OMe, n⁵ is 3, B1′ is 2′-OMe or 2′-F, q¹ is 9, T1′ is 2′-F, q² is 1, B2′ is 2′-OMe or 2′-F, q³ is 4, T2′ is 2′-F, q⁴ is 2, B3′ is 2′-OMe or 2′-F, q⁵ is 5, T3′ is 2′-F, q⁶ is 1, B4′ is 2′-OMe, and q⁷ is 1; with two phosphorothioate internucleotide linkage modifications within position 1-5 of the sense strand (counting from the 5′-end of the sense strand), and two phosphorothioate internucleotide linkage modifications at positions 1 and 2 and two phosphorothioate internucleotide linkage modifications within positions 18-23 of the antisense strand (counting from the 5′-end of the antisense strand). The RNAi agent also comprises a 5′-PS.

[0374] In one embodiment, B1 is 2′-OMe or 2′-F, n¹ is 8, T1 is 2′F, n² is 3, B2 is 2′-OMe, n³ is 7, n⁴ is 0, B3 is 2′-OMe, n⁵ is 3, B1′ is 2′-OMe or 2′-F, q¹ is 9, T1′ is 2′-F, q² is 1, B2′ is 2′-OMe or 2′-F, q³ is 4, T2′ is 2′-F, q⁴ is 2, B3′ is 2′-OMe or 2′-F, q⁵ is 5, T3′ is 2′-F, q⁶ is 1, B4′ is 2′-OMe, and q⁷ is 1; with two phosphorothioate internucleotide linkage modifications within position 1-5 of the sense strand (counting from the 5′-end of the sense strand), and two phosphorothioate internucleotide linkage modifications at positions 1 and 2 and two phosphorothioate internucleotide linkage modifications within positions 18-23 of the antisense strand (counting from the 5′-end of the antisense strand). The RNAi agent also comprises a 5′-VP. The 5′-VP may be 5′-E-VP, 5′-Z-VP, or combination thereof.

[0375] In one embodiment, B1 is 2′-OMe or 2′-F, n¹ is 8, T1 is 2′F, n² is 3, B2 is 2′-OMe, n³ is 7, n⁴ is 0, B3 is 2′-OMe, n⁵ is 3, B1′ is 2′-OMe or 2′-F, q¹ is 9, T1′ is 2′-F, q² is 1, B2′ is 2′-OMe or 2′-F, q³ is 4, T2′ is 2′-F, q⁴ is 2, B3′ is 2′-OMe or 2′-F, q⁵ is 5, T3′ is 2′-F, q⁶ is 1, B4′ is 2′-OMe, and q⁷ is 1; with two phosphorothioate internucleotide linkage modifications within position 1-5 of the sense strand (counting from the 5′-end of the sense strand), and two phosphorothioate internucleotide linkage modifications at positions 1 and 2 and two phosphorothioate internucleotide linkage modifications within positions 18-23 of the antisense strand (counting from the 5′-end of the antisense strand). The RNAi agent also comprises a 5′-PS₂.

[0376] In one embodiment, B1 is 2′-OMe or 2′-F, n¹ is 8, T1 is 2′F, n² is 3, B2 is 2′-OMe, n³ is 7, n⁴ is 0, B3 is 2′-OMe, n⁵ is 3, B1′ is 2′-OMe or 2′-F, q¹ is 9, T1′ is 2′-F, q² is 1, B2′ is 2′-OMe or 2′-F, q³ is 4, T2′ is 2′-F, q⁴ is 2, B3′ is 2′-OMe or 2′-F, q⁵ is 5, T3′ is 2′-F, q⁶ is 1, B4′ is 2′-OMe, and q⁷ is 1; with two phosphorothioate internucleotide linkage modifications within position 1-5 of the sense strand (counting from the 5′-end of the sense strand), and two phosphorothioate internucleotide linkage modifications at positions 1 and 2 and two phosphorothioate internucleotide linkage modifications within positions 18-23 of the antisense strand (counting from the 5′-end of the antisense strand). The RNAi agent also comprises a 5′-deoxy-5′-C-malonyl.

[0377] In one embodiment, B1 is 2′-OMe or 2′-F, n¹ is 8, T1 is 2′F, n² is 3, B2 is 2′-OMe, n³ is 7, n⁴ is 0, B3 is 2′-OMe, n⁵ is 3, B1′ is 2′-OMe or 2′-F, q¹ is 9, T1′ is 2′-F, q² is 1, B2′ is 2′-OMe or 2′-F, q³ is 4, q⁴ is 0, B3′ is 2′-OMe or 2′-F, q⁵ is 7, T3′ is 2′-F, q⁶ is 1, B4′ is 2′-OMe, and q⁷ is 1. The RNAi agent also comprises a 5′-P.

[0378] In one embodiment, B1 is 2′-OMe or 2′-F, n¹ is 8, T1 is 2′F, n² is 3, B2 is 2′-OMe, n³ is 7, n⁴ is 0, B3 is 2′-OMe, n⁵ is 3, B1′ is 2′-OMe or 2′-F, q¹ is 9, T1′ is 2′-F, q² is 1, B2′ is 2′-OMe or 2′-F, q³ is 4, q⁴ is 0, B3′ is 2′-OMe or 2′-F, q⁵ is 7, T3′ is 2′-F, q⁶ is 1, B4′ is 2′-OMe, and q⁷ is 1. The dsRNA agent also comprises a 5′-PS.

[0379] In one embodiment, B1 is 2′-OMe or 2′-F, n¹ is 8, T1 is 2′F, n² is 3, B2 is 2′-OMe, n³ is 7, n⁴ is 0, B3 is 2′-OMe, n⁵ is 3, B1′ is 2′-OMe or 2′-F, q¹ is 9, T1′ is 2′-F, q² is 1, B2′ is 2′-OMe or 2′-F, q³ is 4, q⁴ is 0, B3′ is 2′-OMe or 2′-F, q⁵ is 7, T3′ is 2′-F, q⁶ is 1, B4′ is 2′-OMe, and q⁷ is 1. The RNAi agent also comprises a 5′-VP. The 5′-VP may be 5′-E-VP, 5′-Z-VP, or combination thereof.

[0380] In one embodiment, B1 is 2′-OMe or 2′-F, n¹ is 8, T1 is 2′F, n² is 3, B2 is 2′-OMe, n³ is 7, n⁴ is 0, B3 is 2′-OMe, n⁵ is 3, B1′ is 2′-OMe or 2′-F, q¹ is 9, T1′ is 2′-F, q² is 1, B2′ is 2′-OMe or 2′-F, q³ is 4, q⁴ is 0, B3′ is 2′-OMe or 2′-F, q⁵ is 7, T3′ is 2′-F, q⁶ is 1, B4′ is 2′-OMe, and q⁷ is 1. The RNAi agent also comprises a 5′-PS₂.

[0381] In one embodiment, B1 is 2′-OMe or 2′-F, n¹ is 8, T1 is 2′F, n² is 3, B2 is 2′-OMe, n³ is 7, n⁴ is 0, B3 is 2′-OMe, n⁵ is 3, B1′ is 2′-OMe or 2′-F, q¹ is 9, T1′ is 2′-F, q² is 1, B2′ is 2′-OMe or 2′-F, q³ is 4, q⁴ is 0, B3′ is 2′-OMe or 2′-F, q⁵ is 7, T3′ is 2′-F, q⁶ is 1, B4′ is 2′-OMe, and q⁷ is 1. The RNAi agent also comprises a 5′-deoxy-5′-C-malonyl.

[0382] In one embodiment, B1 is 2′-OMe or 2′-F, n¹ is 8, T1 is 2′F, n² is 3, B2 is 2′-OMe, n³ is 7, n⁴ is 0, B3 is 2′-OMe, n⁵ is 3, B1′ is 2′-OMe or 2′-F, q¹ is 9, T1′ is 2′-F, q² is 1, B2′ is 2′-OMe or 2′-F, q³ is 4, q⁴ is 0, B3′ is 2′-OMe or 2′-F, q⁵ is 7, T3′ is 2′-F, q⁶ is 1, B4′ is 2′-OMe, and q⁷ is 1; with two phosphorothioate internucleotide linkage modifications within position 1-5 of the sense strand (counting from the 5′-end), and two phosphorothioate internucleotide linkage modifications at positions 1 and 2 and two phosphorothioate internucleotide linkage modifications within positions 18-23 of the antisense strand (counting from the 5′-end). The RNAi agent also comprises a 5′-P.

[0383] In one embodiment, B1 is 2′-OMe or 2′-F, n¹ is 8, T1 is 2′F, n² is 3, B2 is 2′-OMe, n³ is 7, n⁴ is 0, B3 is 2′-OMe, n⁵ is 3, B1′ is 2′-OMe or 2′-F, q¹ is 9, T1′ is 2′-F, q² is 1, B2′ is 2′-OMe or 2′-F, q³ is 4, q⁴ is 0, B3′ is 2′-OMe or 2′-F, q⁵ is 7, T3′ is 2′-F, q⁶ is 1, B4′ is 2′-OMe, and q⁷ is 1; with two phosphorothioate internucleotide linkage modifications within position 1-5 of the sense strand (counting from the 5′-end), and two phosphorothioate internucleotide linkage modifications at positions 1 and 2 and two phosphorothioate internucleotide linkage modifications within positions 18-23 of the antisense strand (counting from the 5′-end). The RNAi agent also comprises a 5′-PS.

[0384] In one embodiment, B1 is 2′-OMe or 2′-F, n¹ is 8, T1 is 2′F, n² is 3, B2 is 2′-OMe, n³ is 7, n⁴ is 0, B3 is 2′-OMe, n⁵ is 3, B1′ is 2′-OMe or 2′-F, q¹ is 9, T1′ is 2′-F, q² is 1, B2′ is 2′-OMe or 2′-F, q³ is 4, q⁴ is 0, B3′ is 2′-OMe or 2′-F, q⁵ is 7, T3′ is 2′-F, q⁶ is 1, B4′ is 2′-OMe, and q⁷ is 1; with two phosphorothioate internucleotide linkage modifications within position 1-5 of the sense strand (counting from the 5′-end), and two phosphorothioate internucleotide linkage modifications at positions 1 and 2 and two phosphorothioate internucleotide linkage modifications within positions 18-23 of the antisense strand (counting from the 5′-end). The RNAi agent also comprises a 5′-VP. The 5′-VP may be 5′-E-VP, 5′-Z-VP, or combination thereof.

[0385] In one embodiment, B1 is 2′-OMe or 2′-F, n¹ is 8, T1 is 2′F, n² is 3, B2 is 2′-OMe, n³ is 7, n⁴ is 0, B3 is 2′-OMe, n⁵ is 3, B1′ is 2′-OMe or 2′-F, q¹ is 9, T1′ is 2′-F, q² is 1, B2′ is 2′-OMe or 2′-F, q³ is 4, q⁴ is 0, B3′ is 2′-OMe or 2′-F, q⁵ is 7, T3′ is 2′-F, q⁶ is 1, B4′ is 2′-OMe, and q⁷ is 1; with two phosphorothioate internucleotide linkage modifications within position 1-5 of the sense strand (counting from the 5′-end), and two phosphorothioate internucleotide linkage modifications at positions 1 and 2 and two phosphorothioate internucleotide linkage modifications within positions 18-23 of the antisense strand (counting from the 5′-end). The RNAi agent also comprises a 5′-PS₂.

[0386] In one embodiment, B1 is 2′-OMe or 2′-F, n¹ is 8, T1 is 2′F, n² is 3, B2 is 2′-OMe, n³ is 7, n⁴ is 0, B3 is 2′-OMe, n⁵ is 3, B1′ is 2′-OMe or 2′-F, q¹ is 9, T1′ is 2′-F, q² is 1, B2′ is 2′-OMe or 2′-F, q³ is 4, q⁴ is 0, B3′ is 2′-OMe or 2′-F, q⁵ is 7, T3′ is 2′-F, q⁶ is 1, B4′ is 2′-OMe, and q⁷ is 1; with two phosphorothioate internucleotide linkage modifications within position 1-5 of the sense strand (counting from the 5′-end), and two phosphorothioate internucleotide linkage modifications at positions 1 and 2 and two phosphorothioate internucleotide linkage modifications within positions 18-23 of the antisense strand (counting from the 5′-end). The RNAi agent also comprises a 5′-deoxy-5′-C-malonyl.

[0387] In one embodiment, B1 is 2′-OMe or 2′-F, n¹ is 8, T1 is 2′F, n² is 3, B2 is 2′-OMe, n³ is 7, n⁴ is 0, B3 is 2′OMe, n⁵ is 3, B1′ is 2′-OMe or 2′-F, q¹ is 9, T1′ is 2′-F, q² is 1, B2′ is 2′-OMe or 2′-F, q³ is 4, T2′ is 2′-F, q⁴ is 2, B3′ is 2′-OMe or 2′-F, q⁵ is 5, T3′ is 2′-F, q⁶ is 1, B4′ is 2′-F, and q⁷ is 1. The RNAi agent also comprises a 5′-P.

[0388] In one embodiment, B1 is 2′-OMe or 2′-F, n¹ is 8, T1 is 2′F, n² is 3, B2 is 2′-OMe, n³ is 7, n⁴ is 0, B3 is 2′OMe, n⁵ is 3, B1′ is 2′-OMe or 2′-F, q¹ is 9, T1′ is 2′-F, q² is 1, B2′ is 2′-OMe or 2′-F, q3 is 4, T2′ is 2′-F, q⁴ is 2, B3′ is 2′-OMe or 2′-F, q⁵ is 5, T3′ is 2′-F, q⁶ is 1, B4′ is 2′-F, and q⁷ is 1.

[0389] The RNAi agent also comprises a 5′-PS.

[0390] In one embodiment, B1 is 2′-OMe or 2′-F, n¹ is 8, T1 is 2′F, n² is 3, B2 is 2′-OMe, n³ is 7, n⁴ is 0, B3 is 2′OMe, n⁵ is 3, B1′ is 2′-OMe or 2′-F, q¹ is 9, T1′ is 2′-F, q² is 1, B2′ is 2′-OMe or 2′-F, q³ is 4, T2′ is 2′-F, q⁴ is 2, B3′ is 2′-OMe or 2′-F, q⁵ is 5, T3′ is 2′-F, q⁶ is 1, B4′ is 2′-F, and q⁷ is 1.

[0391] The RNAi agent also comprises a 5′-VP. The 5′-VP may be 5′-E-VP, 5′-Z-VP, or combination thereof.

[0392] In one embodiment, B1 is 2′-OMe or 2′-F, n¹ is 8, T1 is 2′F, n² is 3, B2 is 2′-OMe, n³ is 7, n⁴ is 0, B3 is 2′OMe, n⁵ is 3, B1′ is 2′-OMe or 2′-F, q¹ is 9, T1′ is 2′-F, q² is 1, B2′ is 2′-OMe or 2′-F, q³ is 4, T2′ is 2′-F, q⁴ is 2, B3′ is 2′-OMe or 2′-F, q⁵ is 5, T3′ is 2′-F, q⁶ is 1, B4′ is 2′-F, and q⁷ is 1. The dsRNAi RNA agent also comprises a 5′-PS₂.

[0393] In one embodiment, B1 is 2′-OMe or 2′-F, n¹ is 8, T1 is 2′F, n² is 3, B2 is 2′-OMe, n³ is 7, n⁴ is 0, B3 is 2′OMe, n⁵ is 3, B1′ is 2′-OMe or 2′-F, q¹ is 9, T1′ is 2′-F, q² is 1, B2′ is 2′-OMe or 2′-F, q³ is 4, T2′ is 2′-F, q⁴ is 2, B3′ is 2′-OMe or 2′-F, q⁵ is 5, T3′ is 2′-F, q⁶ is 1, B4′ is 2′-F, and q⁷ is 1.

[0394] The RNAi agent also comprises a 5′-deoxy-5′-C-malonyl.

[0395] In one embodiment, B1 is 2′-OMe or 2′-F, n¹ is 8, T1 is 2′F, n² is 3, B2 is 2′-OMe, n³ is 7, n⁴ is 0, B3 is 2′-OMe, n⁵ is 3, B1′ is 2′-OMe or 2′-F, q¹ is 9, T1′ is 2′-F, q² is 1, B2′ is 2′-OMe or 2′-F, q³ is 4, T2′ is 2′-F, q⁴ is 2, B3′ is 2′-OMe or 2′-F, q⁵ is 5, T3′ is 2′-F, q⁶ is 1, B4′ is 2′-F, and q⁷ is 1; with two phosphorothioate internucleotide linkage modifications within position 1-5 of the sense strand (counting from the 5′-end of the sense strand), and two phosphorothioate internucleotide linkage modifications at positions 1 and 2 and two phosphorothioate internucleotide linkage modifications within positions 18-23 of the antisense strand (counting from the 5′-end of the antisense strand). The RNAi agent also comprises a 5′-P.

[0396] In one embodiment, B1 is 2′-OMe or 2′-F, n¹ is 8, T1 is 2′F, n² is 3, B2 is 2′-OMe, n³ is 7, n⁴ is 0, B3 is 2′-OMe, n⁵ is 3, B1′ is 2′-OMe or 2′-F, q¹ is 9, T1′ is 2′-F, q² is 1, B2′ is 2′-OMe or 2′-F, q³ is 4, T2′ is 2′-F, q⁴ is 2, B3′ is 2′-OMe or 2′-F, q⁵ is 5, T3′ is 2′-F, q⁶ is 1, B4′ is 2′-F, and q⁷ is 1; with two phosphorothioate internucleotide linkage modifications within position 1-5 of the sense strand (counting from the 5′-end of the sense strand), and two phosphorothioate internucleotide linkage modifications at positions 1 and 2 and two phosphorothioate internucleotide linkage modifications within positions 18-23 of the antisense strand (counting from the 5′-end of the antisense strand). The RNAi agent also comprises a 5′-PS.

[0397] In one embodiment, B1 is 2′-OMe or 2′-F, n¹ is 8, T1 is 2′F, n² is 3, B2 is 2′-OMe, n³ is 7, n⁴ is 0, B3 is 2′-OMe, n⁵ is 3, B1′ is 2′-OMe or 2′-F, q¹ is 9, T1′ is 2′-F, q² is 1, B2′ is 2′-OMe or 2′-F, q³ is 4, T2′ is 2′-F, q⁴ is 2, B3′ is 2′-OMe or 2′-F, q⁵ is 5, T3′ is 2′-F, q⁶ is 1, B4′ is 2′-F, and q⁷ is 1; with two phosphorothioate internucleotide linkage modifications within position 1-5 of the sense strand (counting from the 5′-end of the sense strand), and two phosphorothioate internucleotide linkage modifications at positions 1 and 2 and two phosphorothioate internucleotide linkage modifications within positions 18-23 of the antisense strand (counting from the 5′-end of the antisense strand). The RNAi agent also comprises a 5′-VP. The 5′-VP may be 5′-E-VP, 5′-Z-VP, or combination thereof.

[0398] In one embodiment, B1 is 2′-OMe or 2′-F, n¹ is 8, T1 is 2′F, n² is 3, B2 is 2′-OMe, n³ is 7, n⁴ is 0, B3 is 2′-OMe, n⁵ is 3, B1′ is 2′-OMe or 2′-F, q¹ is 9, T1′ is 2′-F, q² is 1, B2′ is 2′-OMe or 2′-F, q³ is 4, T2′ is 2′-F, q⁴ is 2, B3′ is 2′-OMe or 2′-F, q⁵ is 5, T3′ is 2′-F, q⁶ is 1, B4′ is 2′-F, and q⁷ is 1; with two phosphorothioate internucleotide linkage modifications within position 1-5 of the sense strand (counting from the 5′-end of the sense strand), and two phosphorothioate internucleotide linkage modifications at positions 1 and 2 and two phosphorothioate internucleotide linkage modifications within positions 18-23 of the antisense strand (counting from the 5′-end of the antisense strand). The RNAi agent also comprises a 5′-PS₂.

[0399] In one embodiment, B1 is 2′-OMe or 2′-F, n¹ is 8, T1 is 2′F, n² is 3, B2 is 2′-OMe, n³ is 7, n⁴ is 0, B3 is 2′-OMe, n⁵ is 3, B1′ is 2′-OMe or 2′-F, q¹ is 9, T1′ is 2′-F, q² is 1, B2′ is 2′-OMe or 2′-F, q³ is 4, T2′ is 2′-F, q⁴ is 2, B3′ is 2′-OMe or 2′-F, q⁵ is 5, T3′ is 2′-F, q⁶ is 1, B4′ is 2′-F, and q⁷ is 1; with two phosphorothioate internucleotide linkage modifications within position 1-5 of the sense strand (counting from the 5′-end of the sense strand), and two phosphorothioate internucleotide linkage modifications at positions 1 and 2 and two phosphorothioate internucleotide linkage modifications within positions 18-23 of the antisense strand (counting from the 5′-end of the antisense strand). The RNAi agent also comprises a 5′-deoxy-5′-C-malonyl.

[0400] In one embodiment, B1 is 2′-OMe or 2′-F, n¹ is 8, T1 is 2′F, n² is 3, B2 is 2′-OMe, n³ is 7, n⁴ is 0, B3 is 2′-OMe, n⁵ is 3, B1′ is 2′-OMe or 2′-F, q¹ is 9, T1′ is 2′-F, q² is 1, B2′ is 2′-OMe or 2′-F, q³ is 4, q⁴ is 0, B3′ is 2′-OMe or 2′-F, q⁵ is 7, T3′ is 2′-F, q⁶ is 1, B4′ is 2′-F, and q⁷ is 1. The RNAi agent also comprises a 5′-P.

[0401] In one embodiment, B1 is 2′-OMe or 2′-F, n¹ is 8, T1 is 2′F, n² is 3, B2 is 2′-OMe, n³ is 7, n⁴ is 0, B3 is 2′-OMe, n⁵ is 3, B1′ is 2′-OMe or 2′-F, q¹ is 9, T1′ is 2′-F, q² is 1, B2′ is 2′-OMe or 2′-F, q³ is 4, q⁴ is 0, B3′ is 2′-OMe or 2′-F, q⁵ is 7, T3′ is 2′-F, q⁶ is 1, B4′ is 2′-F, and q⁷ is 1. The RNAi agent also comprises a 5′-PS.

[0402] In one embodiment, B1 is 2′-OMe or 2′-F, n¹ is 8, T1 is 2′F, n² is 3, B2 is 2′-OMe, n³ is 7, n⁴ is 0, B3 is 2′-OMe, n⁵ is 3, B1′ is 2′-OMe or 2′-F, q¹ is 9, T1′ is 2′-F, q² is 1, B2′ is 2′-OMe or 2′-F, q³ is 4, q⁴ is 0, B3′ is 2′-OMe or 2′-F, q⁵ is 7, T3′ is 2′-F, q⁶ is 1, B4′ is 2′-F, and q⁷ is 1. The RNAi agent also comprises a 5′-VP. The 5′-VP may be 5′-E-VP, 5′-Z-VP, or combination thereof.

[0403] In one embodiment, B1 is 2′-OMe or 2′-F, n¹ is 8, T1 is 2′F, n² is 3, B2 is 2′-OMe, n³ is 7, n⁴ is 0, B3 is 2′-OMe, n⁵ is 3, B1′ is 2′-OMe or 2′-F, q¹ is 9, T1′ is 2′-F, q² is 1, B2′ is 2′-OMe or 2′-F, q³ is 4, q⁴ is 0, B3′ is 2′-OMe or 2′-F, q⁵ is 7, T3′ is 2′-F, q⁶ is 1, B4′ is 2′-F, and q⁷ is 1. The RNAi agent also comprises a 5′-PS₂.

[0404] In one embodiment, B1 is 2′-OMe or 2′-F, n¹ is 8, T1 is 2′F, n² is 3, B2 is 2′-OMe, n³ is 7, n⁴ is 0, B3 is 2′-OMe, n⁵ is 3, B1′ is 2′-OMe or 2′-F, q¹ is 9, T1′ is 2′-F, q² is 1, B2′ is 2′-OMe or 2′-F, q³ is 4, q⁴ is 0, B3′ is 2′-OMe or 2′-F, q⁵ is 7, T3′ is 2′-F, q⁶ is 1, B4′ is 2′-F, and q⁷ is 1. The RNAi agent also comprises a 5′-deoxy-5′-C-malonyl.

[0405] In one embodiment, B1 is 2′-OMe or 2′-F, n¹ is 8, T1 is 2′F, n² is 3, B2 is 2′-OMe, n³ is 7, n⁴ is 0, B3 is 2′-OMe, n⁵ is 3, B1′ is 2′-OMe or 2′-F, q¹ is 9, T1′ is 2′-F, q² is 1, B2′ is 2′-OMe or 2′-F, q³ is 4, q⁴ is 0, B3′ is 2′-OMe or 2′-F, q⁵ is 7, T3′ is 2′-F, q⁶ is 1, B4′ is 2′-F, and q⁷ is 1; with two phosphorothioate internucleotide linkage modifications within position 1-5 of the sense strand (counting from the 5′-end of the sense strand), and two phosphorothioate internucleotide linkage modifications at positions 1 and 2 and two phosphorothioate internucleotide linkage modifications within positions 18-23 of the antisense strand (counting from the 5′-end of the antisense strand). The RNAi agent also comprises a 5′-P.

[0406] In one embodiment, B1 is 2′-OMe or 2′-F, n¹ is 8, T1 is 2′F, n² is 3, B2 is 2′-OMe, n³ is 7, n⁴ is 0, B3 is 2′-OMe, n⁵ is 3, B1′ is 2′-OMe or 2′-F, q¹ is 9, T1′ is 2′-F, q² is 1, B2′ is 2′-OMe or 2′-F, q³ is 4, q⁴ is 0, B3′ is 2′-OMe or 2′-F, q⁵ is 7, T3′ is 2′-F, q⁶ is 1, B4′ is 2′-F, and q⁷ is 1; with two phosphorothioate internucleotide linkage modifications within position 1-5 of the sense strand (counting from the 5′-end of the sense strand), and two phosphorothioate internucleotide linkage modifications at positions 1 and 2 and two phosphorothioate internucleotide linkage modifications within positions 18-23 of the antisense strand (counting from the 5′-end of the antisense strand). The RNAi agent also comprises a 5′-PS.

[0407] In one embodiment, B1 is 2′-OMe or 2′-F, n¹ is 8, T1 is 2′F, n² is 3, B2 is 2′-OMe, n³ is 7, n⁴ is 0, B3 is 2′-OMe, n⁵ is 3, B1′ is 2′-OMe or 2′-F, q¹ is 9, T1′ is 2′-F, q² is 1, B2′ is 2′-OMe or 2′-F, q³ is 4, q⁴ is 0, B3′ is 2′-OMe or 2′-F, q⁵ is 7, T3′ is 2′-F, q⁶ is 1, B4′ is 2′-F, and q⁷ is 1; with two phosphorothioate internucleotide linkage modifications within position 1-5 of the sense strand (counting from the 5′-end of the sense strand), and two phosphorothioate internucleotide linkage modifications at positions 1 and 2 and two phosphorothioate internucleotide linkage modifications within positions 18-23 of the antisense strand (counting from the 5′-end of the antisense strand). The RNAi agent also comprises a 5′-VP. The 5′-VP may be 5′-E-VP, 5′-Z-VP, or combination thereof.

[0408] In one embodiment, B1 is 2′-OMe or 2′-F, n¹ is 8, T1 is 2′F, n² is 3, B2 is 2′-OMe, n³ is 7, n⁴ is 0, B3 is 2′-OMe, n⁵ is 3, B1′ is 2′-OMe or 2′-F, q¹ is 9, T1′ is 2′-F, q² is 1, B2′ is 2′-OMe or 2′-F, q³ is 4, q⁴ is 0, B3′ is 2′-OMe or 2′-F, q⁵ is 7, T3′ is 2′-F, q⁶ is 1, B4′ is 2′-F, and q⁷ is 1; with two phosphorothioate internucleotide linkage modifications within position 1-5 of the sense strand (counting from the 5′-end of the sense strand), and two phosphorothioate internucleotide linkage modifications at positions 1 and 2 and two phosphorothioate internucleotide linkage modifications within positions 18-23 of the antisense strand (counting from the 5′-end of the antisense strand). The RNAi agent also comprises a 5′-PS₂.

[0409] In one embodiment, B1 is 2′-OMe or 2′-F, n¹ is 8, T1 is 2′F, n² is 3, B2 is 2′-OMe, n³ is 7, n⁴ is 0, B3 is 2′-OMe, n⁵ is 3, B1′ is 2′-OMe or 2′-F, q¹ is 9, T1′ is 2′-F, q² is 1, B2′ is 2′-OMe or 2′-F, q³ is 4, q⁴ is 0, B3′ is 2′-OMe or 2′-F, q⁵ is 7, T3′ is 2′-F, q⁶ is 1, B4′ is 2′-F, and q⁷ is 1; with two phosphorothioate internucleotide linkage modifications within position 1-5 of the sense strand (counting from the 5′-end of the sense strand), and two phosphorothioate internucleotide linkage modifications at positions 1 and 2 and two phosphorothioate internucleotide linkage modifications within positions 18-23 of the antisense strand (counting from the 5′-end of the antisense strand). The RNAi agent also comprises a 5′-deoxy-5′-C-malonyl.

[0410] In one embodiment, B1 is 2′-OMe or 2′-F, n¹ is 8, T1 is 2′F, n² is 3, B2 is 2′-OMe, n³ is 7, n⁴ is 0, B3 is 2′-OMe, n⁵ is 3, B1′ is 2′-OMe or 2′-F, q¹ is 9, T1′ is 2′-F, q² is 1, B2′ is 2′-OMe or 2′-F, q³ is 4, T2′ is 2′-F, q⁴ is 2, B3′ is 2′-OMe or 2′-F, q⁵ is 5, T3′ is 2′-F, q⁶ is 1, B4′ is 2′-OMe, and q⁷ is 1; with two phosphorothioate internucleotide linkage modifications within position 1-5 of the sense strand (counting from the 5′-end of the sense strand), and two phosphorothioate internucleotide linkage modifications at positions 1 and 2 and two phosphorothioate internucleotide linkage modifications within positions 18-23 of the antisense strand (counting from the 5′-end of the antisense strand). The RNAi agent also comprises a 5′-P and a targeting ligand. In one embodiment, the 5′-P is at the 5′-end of the antisense strand, and the targeting ligand is at the 3′-end of the sense strand.

[0411] In one embodiment, B1 is 2′-OMe or 2′-F, n¹ is 8, T1 is 2′F, n² is 3, B2 is 2′-OMe, n³ is 7, n⁴ is 0, B3 is 2′-OMe, n⁵ is 3, B1′ is 2′-OMe or 2′-F, q¹ is 9, T1′ is 2′-F, q² is 1, B2′ is 2′-OMe or 2′-F, q³ is 4, T2′ is 2′-F, q⁴ is 2, B3′ is 2′-OMe or 2′-F, q⁵ is 5, T3′ is 2′-F, q⁶ is 1, B4′ is 2′-OMe, and q⁷ is 1; with two phosphorothioate internucleotide linkage modifications within position 1-5 of the sense strand (counting from the 5′-end of the sense strand), and two phosphorothioate internucleotide linkage modifications at positions 1 and 2 and two phosphorothioate internucleotide linkage modifications within positions 18-23 of the antisense strand (counting from the 5′-end of the antisense strand). The RNAi agent also comprises a 5′-PS and a targeting ligand. In one embodiment, the 5′-PS is at the 5′-end of the antisense strand, and the targeting ligand is at the 3′-end of the sense strand.

[0412] In one embodiment, B1 is 2′-OMe or 2′-F, n¹ is 8, T1 is 2′F, n² is 3, B2 is 2′-OMe, n³ is 7, n⁴ is 0, B3 is 2′-OMe, n⁵ is 3, B1′ is 2′-OMe or 2′-F, q¹ is 9, T1′ is 2′-F, q² is 1, B2′ is 2′-OMe or 2′-F, q³ is 4, T2′ is 2′-F, q⁴ is 2, B3′ is 2′-OMe or 2′-F, q⁵ is 5, T3′ is 2′-F, q⁶ is 1, B4′ is 2′-OMe, and q⁷ is 1; with two phosphorothioate internucleotide linkage modifications within position 1-5 of the sense strand (counting from the 5′-end of the sense strand), and two phosphorothioate internucleotide linkage modifications at positions 1 and 2 and two phosphorothioate internucleotide linkage modifications within positions 18-23 of the antisense strand (counting from the 5′-end of the antisense strand). The RNAi agent also comprises a 5′-VP (e.g., a 5′-E-VP, 5′-Z-VP, or combination thereof), and a targeting ligand.

[0413] In one embodiment, the 5′-VP is at the 5′-end of the antisense strand, and the targeting ligand is at the 3′-end of the sense strand.

[0414] In one embodiment, B1 is 2′-OMe or 2′-F, n¹ is 8, T1 is 2′F, n² is 3, B2 is 2′-OMe, n³ is 7, n⁴ is 0, B3 is 2′-OMe, n⁵ is 3, B1′ is 2′-OMe or 2′-F, q¹ is 9, T1′ is 2′-F, q² is 1, B2′ is 2′-OMe or 2′-F, q³ is 4, T2′ is 2′-F, q⁴ is 2, B3′ is 2′-OMe or 2′-F, q⁵ is 5, T3′ is 2′-F, q⁶ is 1, B4′ is 2′-OMe, and q⁷ is 1; with two phosphorothioate internucleotide linkage modifications within position 1-5 of the sense strand (counting from the 5′-end of the sense strand), and two phosphorothioate internucleotide linkage modifications at positions 1 and 2 and two phosphorothioate internucleotide linkage modifications within positions 18-23 of the antisense strand (counting from the 5′-end of the antisense strand). The RNAi agent also comprises a 5′-PS₂ and a targeting ligand. In one embodiment, the 5′-PS₂ is at the 5′-end of the antisense strand, and the targeting ligand is at the 3′-end of the sense strand.

[0415] In one embodiment, B1 is 2′-OMe or 2′-F, n¹ is 8, T1 is 2′F, n² is 3, B2 is 2′-OMe, n³ is 7, n⁴ is 0, B3 is 2′-OMe, n⁵ is 3, B1′ is 2′-OMe or 2′-F, q¹ is 9, T1′ is 2′-F, q² is 1, B2′ is 2′-OMe or 2′-F, q³ is 4, T2′ is 2′-F, q⁴ is 2, B3′ is 2′-OMe or 2′-F, q⁵ is 5, T3′ is 2′-F, q⁶ is 1, B4′ is 2′-OMe, and q⁷ is 1; with two phosphorothioate internucleotide linkage modifications within position 1-5 of the sense strand (counting from the 5′-end of the sense strand), and two phosphorothioate internucleotide linkage modifications at positions 1 and 2 and two phosphorothioate internucleotide linkage modifications within positions 18-23 of the antisense strand (counting from the 5′-end of the antisense strand). The RNAi agent also comprises a 5′-deoxy-5′-C-malonyl and a targeting ligand. In one embodiment, the 5′-deoxy-5′-C-malonyl is at the 5′-end of the antisense strand, and the targeting ligand is at the 3′-end of the sense strand.

[0416] In one embodiment, B1 is 2′-OMe or 2′-F, n¹ is 8, T1 is 2′F, n² is 3, B2 is 2′-OMe, n³ is 7, n⁴ is 0, B3 is 2′-OMe, n⁵ is 3, B1′ is 2′-OMe or 2′-F, q¹ is 9, T1′ is 2′-F, q² is 1, B2′ is 2′-OMe or 2′-F, q³ is 4, q⁴ is 0, B3′ is 2′-OMe or 2′-F, q⁵ is 7, T3′ is 2′-F, q⁶ is 1, B4′ is 2′-OMe, and q⁷ is 1; with two phosphorothioate internucleotide linkage modifications within position 1-5 of the sense strand (counting from the 5′-end), and two phosphorothioate internucleotide linkage modifications at positions 1 and 2 and two phosphorothioate internucleotide linkage modifications within positions 18-23 of the antisense strand (counting from the 5′-end). The RNAi agent also comprises a 5′-P and a targeting ligand. In one embodiment, the 5′-P is at the 5′-end of the antisense strand, and the targeting ligand is at the 3′-end of the sense strand.

[0417] In one embodiment, B1 is 2′-OMe or 2′-F, n¹ is 8, T1 is 2′F, n² is 3, B2 is 2′-OMe, n³ is 7, n⁴ is 0, B3 is 2′-OMe, n⁵ is 3, B1′ is 2′-OMe or 2′-F, q¹ is 9, T1′ is 2′-F, q² is 1, B2′ is 2′-OMe or 2′-F, q³ is 4, q⁴ is 0, B3′ is 2′-OMe or 2′-F, q⁵ is 7, T3′ is 2′-F, q⁶ is 1, B4′ is 2′-OMe, and q⁷ is 1; with two phosphorothioate internucleotide linkage modifications within position 1-5 of the sense strand (counting from the 5′-end), and two phosphorothioate internucleotide linkage modifications at positions 1 and 2 and two phosphorothioate internucleotide linkage modifications within positions 18-23 of the antisense strand (counting from the 5′-end). The RNAi agent also comprises a 5′-PS and a targeting ligand. In one embodiment, the 5′-PS is at the 5′-end of the antisense strand, and the targeting ligand is at the 3′-end of the sense strand.

[0418] In one embodiment, B1 is 2′-OMe or 2′-F, n¹ is 8, T1 is 2′F, n² is 3, B2 is 2′-OMe, n³ is 7, n⁴ is 0, B3 is 2′-OMe, n⁵ is 3, B1′ is 2′-OMe or 2′-F, q¹ is 9, T1′ is 2′-F, q² is 1, B2′ is 2′-OMe or 2′-F, q³ is 4, q⁴ is 0, B3′ is 2′-OMe or 2′-F, q⁵ is 7, T3′ is 2′-F, q⁶ is 1, B4′ is 2′-OMe, and q⁷ is 1; with two phosphorothioate internucleotide linkage modifications within position 1-5 of the sense strand (counting from the 5′-end), and two phosphorothioate internucleotide linkage modifications at positions 1 and 2 and two phosphorothioate internucleotide linkage modifications within positions 18-23 of the antisense strand (counting from the 5′-end). The RNAi agent also comprises a 5′-VP (e.g., a 5′-E-VP, 5′-Z-VP, or combination thereof) and a targeting ligand. In one embodiment, the 5′-VP is at the 5′-end of the antisense strand, and the targeting ligand is at the 3′-end of the sense strand.

[0419] In one embodiment, B1 is 2′-OMe or 2′-F, n¹ is 8, T1 is 2′F, n² is 3, B2 is 2′-OMe, n³ is 7, n⁴ is 0, B3 is 2′-OMe, n⁵ is 3, B1′ is 2′-OMe or 2′-F, q¹ is 9, T1′ is 2′-F, q² is 1, B2′ is 2′-OMe or 2′-F, q³ is 4, q⁴ is 0, B3′ is 2′-OMe or 2′-F, q⁵ is 7, T3′ is 2′-F, q⁶ is 1, B4′ is 2′-OMe, and q⁷ is 1; with two phosphorothioate internucleotide linkage modifications within position 1-5 of the sense strand (counting from the 5′-end), and two phosphorothioate internucleotide linkage modifications at positions 1 and 2 and two phosphorothioate internucleotide linkage modifications within positions 18-23 of the antisense strand (counting from the 5′-end). The RNAi agent also comprises a 5′-PS₂ and a targeting ligand. In one embodiment, the 5′-PS₂ is at the 5′-end of the antisense strand, and the targeting ligand is at the 3′-end of the sense strand.

[0420] In one embodiment, B1 is 2′-OMe or 2′-F, n¹ is 8, T1 is 2′F, n² is 3, B2 is 2′-OMe, n³ is 7, n⁴ is 0, B3 is 2′-OMe, n⁵ is 3, B1′ is 2′-OMe or 2′-F, q¹ is 9, T1′ is 2′-F, q² is 1, B2′ is 2′-OMe or 2′-F, q³ is 4, q⁴ is 0, B3′ is 2′-OMe or 2′-F, q⁵ is 7, T3′ is 2′-F, q⁶ is 1, B4′ is 2′-OMe, and q⁷ is 1; with two phosphorothioate internucleotide linkage modifications within position 1-5 of the sense strand (counting from the 5′-end), and two phosphorothioate internucleotide linkage modifications at positions 1 and 2 and two phosphorothioate internucleotide linkage modifications within positions 18-23 of the antisense strand (counting from the 5′-end). The RNAi agent also comprises a 5′-deoxy-5′-C-malonyl and a targeting ligand. In one embodiment, the 5′-deoxy-5′-C-malonyl is at the 5′-end of the antisense strand, and the targeting ligand is at the 3′-end of the sense strand.

[0421] In one embodiment, B1 is 2′-OMe or 2′-F, n¹ is 8, T1 is 2′F, n² is 3, B2 is 2′-OMe, n³ is 7, n⁴ is 0, B3 is 2′-OMe, n⁵ is 3, B1′ is 2′-OMe or 2′-F, q¹ is 9, T1′ is 2′-F, q² is 1, B2′ is 2′-OMe or 2′-F, q³ is 4, T2′ is 2′-F, q⁴ is 2, B3′ is 2′-OMe or 2′-F, q⁵ is 5, T3′ is 2′-F, q⁶ is 1, B4′ is 2′-F, and q⁷ is 1; with two phosphorothioate internucleotide linkage modifications within position 1-5 of the sense strand (counting from the 5′-end of the sense strand), and two phosphorothioate internucleotide linkage modifications at positions 1 and 2 and two phosphorothioate internucleotide linkage modifications within positions 18-23 of the antisense strand (counting from the 5′-end of the antisense strand). The RNAi agent also comprises a 5′-P and a targeting ligand. In one embodiment, the 5′-P is at the 5′-end of the antisense strand, and the targeting ligand is at the 3′-end of the sense strand.

[0422] In one embodiment, B1 is 2′-OMe or 2′-F, n¹ is 8, T1 is 2′F, n² is 3, B2 is 2′-OMe, n³ is 7, n⁴ is 0, B3 is 2′-OMe, n⁵ is 3, B1′ is 2′-OMe or 2′-F, q¹ is 9, T1′ is 2′-F, q² is 1, B2′ is 2′-OMe or 2′-F, q³ is 4, T2′ is 2′-F, q⁴ is 2, B3′ is 2′-OMe or 2′-F, q⁵ is 5, T3′ is 2′-F, q⁶ is 1, B4′ is 2′-F, and q⁷ is 1; with two phosphorothioate internucleotide linkage modifications within position 1-5 of the sense strand (counting from the 5′-end of the sense strand), and two phosphorothioate internucleotide linkage modifications at positions 1 and 2 and two phosphorothioate internucleotide linkage modifications within positions 18-23 of the antisense strand (counting from the 5′-end of the antisense strand). The RNAi agent also comprises a 5′-PS and a targeting ligand. In one embodiment, the 5′-PS is at the 5′-end of the antisense strand, and the targeting ligand is at the 3′-end of the sense strand.

[0423] In one embodiment, B1 is 2′-OMe or 2′-F, n¹ is 8, T1 is 2′F, n² is 3, B2 is 2′-OMe, n³ is 7, n⁴ is 0, B3 is 2′-OMe, n⁵ is 3, B1′ is 2′-OMe or 2′-F, q¹ is 9, T1′ is 2′-F, q² is 1, B2′ is 2′-OMe or 2′-F, q³ is 4, T2′ is 2′-F, q⁴ is 2, B3′ is 2′-OMe or 2′-F, q⁵ is 5, T3′ is 2′-F, q⁶ is 1, B4′ is 2′-F, and q⁷ is 1; with two phosphorothioate internucleotide linkage modifications within position 1-5 of the sense strand (counting from the 5′-end of the sense strand), and two phosphorothioate internucleotide linkage modifications at positions 1 and 2 and two phosphorothioate internucleotide linkage modifications within positions 18-23 of the antisense strand (counting from the 5′-end of the antisense strand). The RNAi agent also comprises a 5′-VP (e.g., a 5′-E-VP, 5′-Z-VP, or combination thereof) and a targeting ligand. In one embodiment, the 5′-VP is at the 5′-end of the antisense strand, and the targeting ligand is at the 3′-end of the sense strand.

[0424] In one embodiment, B1 is 2′-OMe or 2′-F, n¹ is 8, T1 is 2′F, n² is 3, B2 is 2′-OMe, n³ is 7, n⁴ is 0, B3 is 2′-OMe, n⁵ is 3, B1′ is 2′-OMe or 2′-F, q¹ is 9, T1′ is 2′-F, q² is 1, B2′ is 2′-OMe or 2′-F, q³ is 4, T2′ is 2′-F, q⁴ is 2, B3′ is 2′-OMe or 2′-F, q⁵ is 5, T3′ is 2′-F, q⁶ is 1, B4′ is 2′-F, and q⁷ is 1; with two phosphorothioate internucleotide linkage modifications within position 1-5 of the sense strand (counting from the 5′-end of the sense strand), and two phosphorothioate internucleotide linkage modifications at positions 1 and 2 and two phosphorothioate internucleotide linkage modifications within positions 18-23 of the antisense strand (counting from the 5′-end of the antisense strand). The RNAi agent also comprises a 5′-PS₂ and a targeting ligand. In one embodiment, the 5′-PS₂ is at the 5′-end of the antisense strand, and the targeting ligand is at the 3′-end of the sense strand.

[0425] In one embodiment, B1 is 2′-OMe or 2′-F, n¹ is 8, T1 is 2′F, n² is 3, B2 is 2′-OMe, n³ is 7, n⁴ is 0, B3 is 2′-OMe, n⁵ is 3, B1′ is 2′-OMe or 2′-F, q¹ is 9, T1′ is 2′-F, q² is 1, B2′ is 2′-OMe or 2′-F, q³ is 4, T2′ is 2′-F, q⁴ is 2, B3′ is 2′-OMe or 2′-F, q⁵ is 5, T3′ is 2′-F, q⁶ is 1, B4′ is 2′-F, and q⁷ is 1; with two phosphorothioate internucleotide linkage modifications within position 1-5 of the sense strand (counting from the 5′-end of the sense strand), and two phosphorothioate internucleotide linkage modifications at positions 1 and 2 and two phosphorothioate internucleotide linkage modifications within positions 18-23 of the antisense strand (counting from the 5′-end of the antisense strand). The RNAi agent also comprises a 5′-deoxy-5′-C-malonyl and a targeting ligand. In one embodiment, the 5′-deoxy-5′-C-malonyl is at the 5′-end of the antisense strand, and the targeting ligand is at the 3′-end of the sense strand.

[0426] In one embodiment, B1 is 2′-OMe or 2′-F, n¹ is 8, T1 is 2′F, n² is 3, B2 is 2′-OMe, n³ is 7, n⁴ is 0, B3 is 2′-OMe, n⁵ is 3, B1′ is 2′-OMe or 2′-F, q¹ is 9, T1′ is 2′-F, q² is 1, B2′ is 2′-OMe or 2′-F, q³ is 4, q⁴ is 0, B3′ is 2′-OMe or 2′-F, q⁵ is 7, T3′ is 2′-F, q⁶ is 1, B4′ is 2′-F, and q⁷ is 1; with two phosphorothioate internucleotide linkage modifications within position 1-5 of the sense strand (counting from the 5′-end of the sense strand), and two phosphorothioate internucleotide linkage modifications at positions 1 and 2 and two phosphorothioate internucleotide linkage modifications within positions 18-23 of the antisense strand (counting from the 5′-end of the antisense strand). The RNAi agent also comprises a 5′-P and a targeting ligand. In one embodiment, the 5′-P is at the 5′-end of the antisense strand, and the targeting ligand is at the 3′-end of the sense strand.

[0427] In one embodiment, B1 is 2′-OMe or 2′-F, n¹ is 8, T1 is 2′F, n² is 3, B2 is 2′-OMe, n³ is 7, n⁴ is 0, B3 is 2′-OMe, n⁵ is 3, B1′ is 2′-OMe or 2′-F, q¹ is 9, T1′ is 2′-F, q² is 1, B2′ is 2′-OMe or 2′-F, q³ is 4, q⁴ is 0, B3′ is 2′-OMe or 2′-F, q⁵ is 7, T3′ is 2′-F, q⁶ is 1, B4′ is 2′-F, and q⁷ is 1; with two phosphorothioate internucleotide linkage modifications within position 1-5 of the sense strand (counting from the 5′-end of the sense strand), and two phosphorothioate internucleotide linkage modifications at positions 1 and 2 and two phosphorothioate internucleotide linkage modifications within positions 18-23 of the antisense strand (counting from the 5′-end of the antisense strand). The RNAi agent also comprises a 5′-PS and a targeting ligand. In one embodiment, the 5′-PS is at the 5′-end of the antisense strand, and the targeting ligand is at the 3′-end of the sense strand.

[0428] In one embodiment, B1 is 2′-OMe or 2′-F, n¹ is 8, T1 is 2′F, n² is 3, B2 is 2′-OMe, n³ is 7, n⁴ is 0, B3 is 2′-OMe, n⁵ is 3, B1′ is 2′-OMe or 2′-F, q¹ is 9, T1′ is 2′-F, q² is 1, B2′ is 2′-OMe or 2′-F, q³ is 4, q⁴ is 0, B3′ is 2′-OMe or 2′-F, q⁵ is 7, T3′ is 2′-F, q⁶ is 1, B4′ is 2′-F, and q⁷ is 1; with two phosphorothioate internucleotide linkage modifications within position 1-5 of the sense strand (counting from the 5′-end of the sense strand), and two phosphorothioate internucleotide linkage modifications at positions 1 and 2 and two phosphorothioate internucleotide linkage modifications within positions 18-23 of the antisense strand (counting from the 5′-end of the antisense strand). The RNAi agent also comprises a 5′-VP (e.g., a 5′-E-VP, 5′-Z-VP, or combination thereof) and a targeting ligand. In one embodiment, the 5′-VP is at the 5′-end of the antisense strand, and the targeting ligand is at the 3′-end of the sense strand.

[0429] In one embodiment, B1 is 2′-OMe or 2′-F, n¹ is 8, T1 is 2′F, n² is 3, B2 is 2′-OMe, n³ is 7, n⁴ is 0, B3 is 2′-OMe, n⁵ is 3, B1′ is 2′-OMe or 2′-F, q¹ is 9, T1′ is 2′-F, q² is 1, B2′ is 2′-OMe or 2′-F, q³ is 4, q⁴ is 0, B3′ is 2′-OMe or 2′-F, q⁵ is 7, T3′ is 2′-F, q⁶ is 1, B4′ is 2′-F, and q⁷ is 1; with two phosphorothioate internucleotide linkage modifications within position 1-5 of the sense strand (counting from the 5′-end of the sense strand), and two phosphorothioate internucleotide linkage modifications at positions 1 and 2 and two phosphorothioate internucleotide linkage modifications within positions 18-23 of the antisense strand (counting from the 5′-end of the antisense strand). The RNAi agent also comprises a 5′-PS₂ and a targeting ligand. In one embodiment, the 5′-PS₂ is at the 5′-end of the antisense strand, and the targeting ligand is at the 3′-end of the sense strand.

[0430] In one embodiment, B1 is 2′-OMe or 2′-F, n¹ is 8, T1 is 2′F, n² is 3, B2 is 2′-OMe, n³ is 7, n⁴ is 0, B3 is 2′-OMe, n⁵ is 3, B1′ is 2′-OMe or 2′-F, q¹ is 9, T1′ is 2′-F, q² is 1, B2′ is 2′-OMe or 2′-F, q³ is 4, q⁴ is 0, B3′ is 2′-OMe or 2′-F, q⁵ is 7, T3′ is 2′-F, q⁶ is 1, B4′ is 2′-F, and q⁷ is 1; with two phosphorothioate internucleotide linkage modifications within position 1-5 of the sense strand (counting from the 5′-end of the sense strand), and two phosphorothioate internucleotide linkage modifications at positions 1 and 2 and two phosphorothioate internucleotide linkage modifications within positions 18-23 of the antisense strand (counting from the 5′-end of the antisense strand). The RNAi agent also comprises a 5′-deoxy-5′-C-malonyl and a targeting ligand. In one embodiment, the 5′-deoxy-5′-C-malonyl is at the 5′-end of the antisense strand, and the targeting ligand is at the 3′-end of the sense strand.

[0431] In a particular embodiment, an RNAi agent of the present invention comprises:
[0432] (a) a sense strand having:
   [0433] (i) a length of 21 nucleotides;
   [0434] (ii) an ASGPR ligand attached to the 3′-end, wherein said ASGPR ligand comprises three GalNAc derivatives attached through a trivalent branched linker; and
   [0435] (iii) 2′-F modifications at positions 1, 3, 5, 7, 9 to 11, 13, 17, 19, and 21, and 2′-OMe modifications at positions 2, 4, 6, 8, 12, 14 to 16, 18, and 20 (counting from the 5′ end); and
[0436] (b) an antisense strand having:
   [0437] (i) a length of 23 nucleotides;
   [0438] (ii) 2′-OMe modifications at positions 1, 3, 5, 9, 11 to 13, 15, 17, 19, 21, and 23, and 2′F modifications at positions 2, 4, 6 to 8, 10, 14, 16, 18, 20, and 22 (counting from the 5′ end); and
   [0439] (iii) phosphorothioate internucleotide linkages between nucleotide positions 21 and 22, and between nucleotide positions 22 and 23 (counting from the 5′ end);
[0440] wherein the dsRNA agents have a two nucleotide overhang at the 3′-end of the antisense strand, and a blunt end at the 5′-end of the antisense strand.

[0441] In another particular embodiment, an RNAi agent of the present invention comprises:
[0442] (a) a sense strand having:
   [0443] (i) a length of 21 nucleotides;
   [0444] (ii) an ASGPR ligand attached to the 3′-end, wherein said ASGPR ligand comprises three GalNAc derivatives attached through a trivalent branched linker;
   [0445] (iii) 2′-F modifications at positions 1, 3, 5, 7, 9 to 11, 13, 15, 17, 19, and 21, and 2′-OMe modifications at positions 2, 4, 6, 8, 12, 14, 16, 18, and 20 (counting from the 5′ end); and
   [0446] (iv) phosphorothioate internucleotide linkages between nucleotide positions 1 and 2, and between nucleotide positions 2 and 3 (counting from the 5′ end);
[0447] and
[0448] (b) an antisense strand having:
   [0449] (i) a length of 23 nucleotides;
   [0450] (ii) 2′-OMe modifications at positions 1, 3, 5, 7, 9, 11 to 13, 15, 17, 19, and 21 to 23, and 2′F modifications at positions 2, 4, 6, 8, 10, 14, 16, 18, and 20 (counting from the 5′ end); and
   [0451] (iii) phosphorothioate internucleotide linkages between nucleotide positions 1 and 2, between nucleotide positions 2 and 3, between nucleotide positions 21 and 22, and between nucleotide positions 22 and 23 (counting from the 5′ end);
      wherein the RNAi agents have a two nucleotide overhang at the 3′-end of the antisense strand, and a blunt end at the 5′-end of the antisense strand.

[0452] In another particular embodiment, a RNAi agent of the present invention comprises:
[0453] (a) a sense strand having:
   [0454] (i) a length of 21 nucleotides;
   [0455] (ii) an ASGPR ligand attached to the 3′-end, wherein said ASGPR ligand comprises three GalNAc derivatives attached through a trivalent branched linker;
   [0456] (iii) 2′-OMe modifications at positions 1 to 6, 8, 10, and 12 to 21, 2′-F modifications at positions 7, and 9, and a deoxy-nucleotide (e.g. dT) at position 11 (counting from the 5′ end); and
   [0457] (iv) phosphorothioate internucleotide linkages between nucleotide positions 1 and 2, and between nucleotide positions 2 and 3 (counting from the 5′ end);
[0458] and
[0459] (b) an antisense strand having:
   [0460] (i) a length of 23 nucleotides;
   [0461] (ii) 2′-OMe modifications at positions 1, 3, 7, 9, 11, 13, 15, 17, and 19 to 23, and 2′-F modifications at positions 2, 4 to 6, 8, 10, 12, 14, 16, and 18 (counting from the 5′ end); and
   [0462] (iii) phosphorothioate internucleotide linkages between nucleotide positions 1 and 2, between nucleotide positions 2 and 3, between nucleotide positions 21 and 22, and between nucleotide positions 22 and 23 (counting from the 5′ end);
      wherein the RNAi agents have a two nucleotide overhang at the 3′-end of the antisense strand, and a blunt end at the 5′-end of the antisense strand.

[0463] In another particular embodiment, a RNAi agent of the present invention comprises:
[0464] (a) a sense strand having:
   [0465] (i) a length of 21 nucleotides;
   [0466] (ii) an ASGPR ligand attached to the 3′-end, wherein said ASGPR ligand comprises three GalNAc derivatives attached through a trivalent branched linker;
   [0467] (iii) 2′-OMe modifications at positions 1 to 6, 8, 10, 12, 14, and 16 to 21, and 2′-F modifications at positions 7, 9, 11, 13, and 15; and
   [0468] (iv) phosphorothioate internucleotide linkages between nucleotide positions 1 and 2, and between nucleotide positions 2 and 3 (counting from the 5′ end);
[0469] and
[0470] (b) an antisense strand having:
   [0471] (i) a length of 23 nucleotides;
   [0472] (ii) 2′-OMe modifications at positions 1, 5, 7, 9, 11, 13, 15, 17, 19, and 21 to 23, and 2′-F modifications at positions 2 to 4, 6, 8, 10, 12, 14, 16, 18, and 20 (counting from the 5′ end); and
   [0473] (iii) phosphorothioate internucleotide linkages between nucleotide positions 1 and 2, between nucleotide positions 2 and 3, between nucleotide positions 21 and 22, and between nucleotide positions 22 and 23 (counting from the 5′ end);
      wherein the RNAi agents have a two nucleotide overhang at the 3′-end of the antisense strand, and a blunt end at the 5′-end of the antisense strand.

[0474] In another particular embodiment, a RNAi agent of the present invention comprises:
[0475] (a) a sense strand having:
   [0476] (i) a length of 21 nucleotides;
   [0477] (ii) an ASGPR ligand attached to the 3′-end, wherein said ASGPR ligand comprises three GalNAc derivatives attached through a trivalent branched linker;
   [0478] (iii) 2′-OMe modifications at positions 1 to 9, and 12 to 21, and 2′-F modifications at positions 10, and 11; and
   [0479] (iv) phosphorothioate internucleotide linkages between nucleotide positions 1 and 2, and between nucleotide positions 2 and 3 (counting from the 5′ end);
[0480] and
[0481] (b) an antisense strand having:
   [0482] (i) a length of 23 nucleotides;
   [0483] (ii) 2′-OMe modifications at positions 1, 3, 5, 7, 9, 11 to 13, 15, 17, 19, and 21 to 23, and 2′-F modifications at positions 2, 4, 6, 8, 10, 14, 16, 18, and 20 (counting from the 5′ end); and
   [0484] (iii) phosphorothioate internucleotide linkages between nucleotide positions 1 and 2, between nucleotide positions 2 and 3, between nucleotide positions 21 and 22, and between nucleotide positions 22 and 23 (counting from the 5′ end);
      wherein the RNAi agents have a two nucleotide overhang at the 3′-end of the antisense strand, and a blunt end at the 5′-end of the antisense strand.

[0485] In another particular embodiment, a RNAi agent of the present invention comprises:
[0486] (a) a sense strand having:
   [0487] (i) a length of 21 nucleotides;
   [0488] (ii) an ASGPR ligand attached to the 3′-end, wherein said ASGPR ligand comprises three GalNAc derivatives attached through a trivalent branched linker;
   [0489] (iii) 2′-F modifications at positions 1, 3, 5, 7, 9 to 11, and 13, and 2′-OMe modifications at positions 2, 4, 6, 8, 12, and 14 to 21; and
   [0490] (iv) phosphorothioate internucleotide linkages between nucleotide positions 1 and 2, and between nucleotide positions 2 and 3 (counting from the 5′ end);
[0491] and
[0492] (b) an antisense strand having:
   [0493] (i) a length of 23 nucleotides;
   [0494] (ii) 2′-OMe modifications at positions 1, 3, 5 to 7, 9, 11 to 13, 15, 17 to 19, and 21 to 23, and 2′-F modifications at positions 2, 4, 8, 10, 14, 16, and 20 (counting from the 5′ end); and
   [0495] (iii) phosphorothioate internucleotide linkages between nucleotide positions 1 and 2, between nucleotide positions 2 and 3, between nucleotide positions 21 and 22, and between nucleotide positions 22 and 23 (counting from the 5′ end);
      wherein the RNAi agents have a two nucleotide overhang at the 3′-end of the antisense strand, and a blunt end at the 5′-end of the antisense strand.

[0496] In another particular embodiment, a RNAi agent of the present invention comprises:
[0497] (a) a sense strand having:
   [0498] (i) a length of 21 nucleotides;
   [0499] (ii) an ASGPR ligand attached to the 3′-end, wherein said ASGPR ligand comprises three GalNAc derivatives attached through a trivalent branched linker;
   [0500] (iii) 2′-OMe modifications at positions 1, 2, 4, 6, 8, 12, 14, 15, 17, and 19 to 21, and 2′-F modifications at positions 3, 5, 7, 9 to 11, 13, 16, and 18; and
   [0501] (iv) phosphorothioate internucleotide linkages between nucleotide positions 1 and 2, and between nucleotide positions 2 and 3 (counting from the 5′ end);
[0502] and
[0503] (b) an antisense strand having:
   [0504] (i) a length of 25 nucleotides;
   [0505] (ii) 2′-OMe modifications at positions 1, 4, 6, 7, 9, 11 to 13, 15, 17, and 19 to 23, 2′-F modifications at positions 2, 3, 5, 8, 10, 14, 16, and 18, and desoxy-nucleotides (e.g. dT) at positions 24 and 25 (counting from the 5′ end); and
   [0506] (iii) phosphorothioate internucleotide linkages between nucleotide positions 1 and 2, between nucleotide positions 2 and 3, between nucleotide positions 21 and 22, and between nucleotide positions 22 and 23 (counting from the 5′ end);
      wherein the RNAi agents have a four nucleotide overhang at the 3′-end of the antisense strand, and a blunt end at the 5′-end of the antisense strand.

[0507] In another particular embodiment, a RNAi agent of the present invention comprises:
[0508] (a) a sense strand having:
   [0509] (i) a length of 21 nucleotides;
   [0510] (ii) an ASGPR ligand attached to the 3′-end, wherein said ASGPR ligand comprises three GalNAc derivatives attached through a trivalent branched linker;
   [0511] (iii) 2′-OMe modifications at positions 1 to 6, 8, and 12 to 21, and 2′-F modifications at positions 7, and 9 to 11; and
   [0512] (iv) phosphorothioate internucleotide linkages between nucleotide positions 1 and 2, and between nucleotide positions 2 and 3 (counting from the 5′ end);
[0513] and
[0514] (b) an antisense strand having:
   [0515] (i) a length of 23 nucleotides;
   [0516] (ii) 2′-OMe modifications at positions 1, 3 to 5, 7, 8, 10 to 13, 15, and 17 to 23, and 2′-F modifications at positions 2, 6, 9, 14, and 16 (counting from the 5′ end); and
   [0517] (iii) phosphorothioate internucleotide linkages between nucleotide positions 1 and 2, between nucleotide positions 2 and 3, between nucleotide positions 21 and 22, and between nucleotide positions 22 and 23 (counting from the 5′ end);
      wherein the RNAi agents have a two nucleotide overhang at the 3′-end of the antisense strand, and a blunt end at the 5′-end of the antisense strand.

[0518] In another particular embodiment, a RNAi agent of the present invention comprises:
[0519] (a) a sense strand having:
   [0520] (i) a length of 21 nucleotides;
   [0521] (ii) an ASGPR ligand attached to the 3′-end, wherein said ASGPR ligand comprises three GalNAc derivatives attached through a trivalent branched linker;
   [0522] (iii) 2′-OMe modifications at positions 1 to 6, 8, and 12 to 21, and 2′-F modifications at positions 7, and 9 to 11; and
   [0523] (iv) phosphorothioate internucleotide linkages between nucleotide positions 1 and 2, and between nucleotide positions 2 and 3 (counting from the 5′ end);
[0524] and
[0525] (b) an antisense strand having:
   [0526] (i) a length of 23 nucleotides;
   [0527] (ii) 2′-OMe modifications at positions 1, 3 to 5, 7, 10 to 13, 15, and 17 to 23, and 2′-F modifications at positions 2, 6, 8, 9, 14, and 16 (counting from the 5′ end); and
   [0528] (iii) phosphorothioate internucleotide linkages between nucleotide positions 1 and 2, between nucleotide positions 2 and 3, between nucleotide positions 21 and 22, and between nucleotide positions 22 and 23 (counting from the 5′ end);
      wherein the RNAi agents have a two nucleotide overhang at the 3′-end of the antisense strand, and a blunt end at the 5′-end of the antisense strand.

[0529] In another particular embodiment, a RNAi agent of the present invention comprises: (a) a sense strand having:
[0530] (i) a length of 19 nucleotides;
[0531] (ii) an ASGPR ligand attached to the 3′-end, wherein said ASGPR ligand comprises three GalNAc derivatives attached through a trivalent branched linker;
[0532] (iii) 2′-OMe modifications at positions 1 to 4, 6, and 10 to 19, and 2′-F modifications at positions 5, and 7 to 9; and
[0533] (iv) phosphorothioate internucleotide linkages between nucleotide positions 1 and 2, and between nucleotide positions 2 and 3 (counting from the 5′ end);
[0534] and
[0535] (b) an antisense strand having:
   [0536] (i) a length of 21 nucleotides;
   [0537] (ii) 2′-OMe modifications at positions 1, 3 to 5, 7, 10 to 13, 15, and 17 to 21, and 2′-F modifications at positions 2, 6, 8, 9, 14, and 16 (counting from the 5′ end); and
   [0538] (iii) phosphorothioate internucleotide linkages between nucleotide positions 1 and 2, between nucleotide positions 2 and 3, between nucleotide positions 19 and 20, and between nucleotide positions 20 and 21 (counting from the 5′ end);
      wherein the RNAi agents have a two nucleotide overhang at the 3′-end of the antisense strand, and a blunt end at the 5′-end of the antisense strand.

[0539] In certain embodiments, the iRNA for use in the methods of the invention is an agent selected from agents listed in any one of Tables 2-3. These agents may further comprise a ligand.

### III. iRNAs Conjugated to Ligands

[0540] Another modification of the RNA of an iRNA of the invention involves chemically linking to the iRNA one or more ligands, moieties or conjugates that enhance the activity, cellular distribution, or cellular uptake of the iRNA e.g., into a cell. Such moieties include but are not limited to lipid moieties such as a cholesterol moiety (Letsinger et al., Proc. Natl. Acid. Sci. USA, 1989, 86: 6553-6556). In other embodiments, the ligand is cholic acid (Manoharan et al., Biorg. Med. Chem. Let., 1994, 4:1053-1060), a thioether, e.g., beryl-S-tritylthiol (Manoharan et al., Ann. N.Y. Acad. Sci., 1992, 660:306-309; Manoharan et al., Biorg. Med. Chem. Let., 1993, 3:2765-2770), a thiocholesterol (Oberhauser et al., Nucl. Acids Res., 1992, 20:533-538), an aliphatic chain, e.g., dodecandiol or undecyl residues (Saison-Behmoaras et al., EMBO J, 1991, 10:1111-1118; Kabanov et al., FEBS Lett., 1990, 259:327-330; Svinarchuk et al., Biochimie, 1993, 75:49-54), a phospholipid, e.g., di-hexadecyl-rac-glycerol or triethyl-ammonium 1,2-di-O-hexadecyl-rac-glycero-3-phosphonate (Manoharan et al., Tetrahedron Lett., 1995, 36:3651-3654; Shea et al., Nucl. Acids Res., 1990, 18:3777-3783), a polyamine or a polyethylene glycol chain (Manoharan et al., Nucleosides & Nucleotides, 1995, 14:969-973), or adamantane acetic acid (Manoharan et al., Tetrahedron Lett., 1995, 36:3651-3654), a palmityl moiety (Mishra et al., Biochim. Biophys. Acta, 1995, 1264:229-237), or an octadecylamine or hexylamino-carbonyloxycholesterol moiety (Crooke et al., J. Pharmacol. Exp. Ther., 1996, 277:923-937).

[0541] In certain embodiments, a ligand alters the distribution, targeting, or lifetime of an iRNA agent into which it is incorporated. In preferred embodiments a ligand provides an enhanced affinity for a selected target, e.g., molecule, cell or cell type, compartment, e.g., a cellular or organ compartment, tissue, organ or region of the body, as, e.g., compared to a species absent such a ligand. Preferred ligands do not take part in duplex pairing in a duplexed nucleic acid.

[0542] Ligands can include a naturally occurring substance, such as a protein (e.g., human serum albumin (HSA), low-density lipoprotein (LDL), or globulin); carbohydrate (e.g., a dextran, pullulan, chitin, chitosan, inulin, cyclodextrin, N-acetylglucosamine, N-acetylgalactosamine, or hyaluronic acid); or a lipid. The ligand can also be a recombinant or synthetic molecule, such as a synthetic polymer, e.g., a synthetic polyamino acid. Examples of polyamino acids include polyamino acid is a polylysine (PLL), poly L-aspartic acid, poly L-glutamic acid, styrene-maleic acid anhydride copolymer, poly(L-lactide-co-glycolied) copolymer, divinyl ether-maleic anhydride copolymer, N-(2-hydroxypropyl)methacrylamide copolymer (HMPA), polyethylene glycol (PEG), polyvinyl alcohol (PVA), polyurethane, poly(2-ethylacryllic acid), N-isopropylacrylamide polymers, or polyphosphazine. Example of polyamines include: polyethylenimine, polylysine (PLL), spermine, spermidine, polyamine, pseudopeptide-polyamine, peptidomimetic polyamine, dendrimer polyamine, arginine, amidine, protamine, cationic lipid, cationic porphyrin, quaternary salt of a polyamine, or an alpha helical peptide.

[0543] Ligands can also include targeting groups, e.g., a cell or tissue targeting agent, e.g., a lectin, glycoprotein, lipid or protein, e.g., an antibody, that binds to a specified cell type such as a kidney cell. A targeting group can be a thyrotropin, melanotropin, lectin, glycoprotein, surfactant protein A, Mucin carbohydrate, multivalent lactose, multivalent galactose, N-acetyl-galactosamine, N-acetyl-glucosamine multivalent mannose, multivalent fucose, glycosylated polyaminoacids, multivalent galactose, transferrin, bisphosphonate, polyglutamate, polyaspartate, a lipid, cholesterol, a steroid, bile acid, folate, vitamin B12, vitamin A, biotin, or an RGD peptide or RGD peptide mimetic. In certain embodiments, the ligand is a multivalent galactose, e.g., an N-acetyl-galactosamine.

[0544] Other examples of ligands include dyes, intercalating agents (e.g. acridines), cross-linkers (e.g. psoralene, mitomycin C), porphyrins (TPPC4, texaphyrin, Sapphyrin), polycyclic aromatic hydrocarbons (e.g., phenazine, dihydrophenazine), artificial endonucleases (e.g. EDTA), lipophilic molecules, e.g., cholesterol, cholic acid, adamantane acetic acid, 1-pyrene butyric acid, dihydrotestosterone, 1,3-Bis-O(hexadecyl)glycerol, geranyloxyhexyl group, hexadecylglycerol, borneol, menthol, 1,3-propanediol, heptadecyl group, palmitic acid, myristic acid, O3-(oleoyl)lithocholic acid, O3-(oleoyl)cholenic acid, dimethoxytrityl, or phenoxazine) and peptide conjugates (e.g., antennapedia peptide, Tat peptide), alkylating agents, phosphate, amino, mercapto, PEG (e.g., PEG-40K), MPEG, [MPEG]₂, polyamino, alkyl, substituted alkyl, radiolabeled markers, enzymes, haptens (e.g. biotin), transport/absorption facilitators (e.g., aspirin, vitamin E, folic acid), synthetic ribonucleases (e.g., imidazole, bisimidazole, histamine, imidazole clusters, acridine-imidazole conjugates, Eu3+ complexes of tetraazamacrocycles), dinitrophenyl, HRP, or AP.

[0545] Ligands can be proteins, e.g., glycoproteins, or peptides, e.g., molecules having a specific affinity for a co-ligand, or antibodies e.g., an antibody, that binds to a specified cell type such as a hepatic cell. Ligands can also include hormones and hormone receptors. They can also include non-peptidic species, such as lipids, lectins, carbohydrates, vitamins, cofactors, multivalent lactose, multivalent galactose, N-acetyl-galactosamine, N-acetyl-glucosamine multivalent mannose, or multivalent fucose. The ligand can be, for example, a lipopolysaccharide, an activator of p38 MAP kinase, or an activator of NF-κB.

[0546] The ligand can be a substance, e.g., a drug, which can increase the uptake of the iRNA agent into the cell, for example, by disrupting the cell's cytoskeleton, e.g., by disrupting the cell's microtubules, microfilaments, or intermediate filaments. The drug can be, for example, taxol, vincristine, vinblastine, cytochalasin, nocodazole, japlakinolide, latrunculin A, phalloidin, swinholide A, indanocine, or myoservin.

[0547] In some embodiments, a ligand attached to an iRNA as described herein acts as a pharmacokinetic modulator (PK modulator). PK modulators include lipophiles, bile acids, steroids, phospholipid analogues, peptides, protein binding agents, PEG, vitamins, etc. Exemplary PK modulators include, but are not limited to, cholesterol, fatty acids, cholic acid, lithocholic acid, dialkylglycerides, diacylglyceride, phospholipids, sphingolipids, naproxen, ibuprofen, vitamin E, biotin. Oligonucleotides that comprise a number of phosphorothioate linkages are also known to bind to serum protein, thus short oligonucleotides, e.g., oligonucleotides of about 5 bases, 10 bases, 15 bases, or 20 bases, comprising multiple of phosphorothioate linkages in the backbone are also amenable to the present invention as ligands (e.g. as PK modulating ligands). In addition, aptamers that bind serum components (e.g. serum proteins) are also suitable for use as PK modulating ligands in the embodiments described herein.

[0548] Ligand-conjugated iRNAs of the invention may be synthesized by the use of an oligonucleotide that bears a pendant reactive functionality, such as that derived from the attachment of a linking molecule onto the oligonucleotide (described below). This reactive oligonucleotide may be reacted directly with commercially-available ligands, ligands that are synthesized bearing any of a variety of protecting groups, or ligands that have a linking moiety attached thereto.

[0549] The oligonucleotides used in the conjugates of the present invention may be conveniently and routinely made through the well-known technique of solid-phase synthesis. Equipment for such synthesis is sold by several vendors including, for example, Applied Biosystems® (Foster City, Calif.). Any other methods for such synthesis known in the art may additionally or alternatively be employed. It is also known to use similar techniques to prepare other oligonucleotides, such as the phosphorothioates and alkylated derivatives.

[0550] In the ligand-conjugated iRNAs and ligand-molecule bearing sequence-specific linked nucleosides of the present invention, the oligonucleotides and oligonucleosides may be assembled on a suitable DNA synthesizer utilizing standard nucleotide or nucleoside precursors, or nucleotide or nucleoside conjugate precursors that already bear the linking moiety, ligand-nucleotide or nucleoside-conjugate precursors that already bear the ligand molecule, or non-nucleoside ligand-bearing building blocks.

[0551] When using nucleotide-conjugate precursors that already bear a linking moiety, the synthesis of the sequence-specific linked nucleosides is typically completed, and the ligand molecule is then reacted with the linking moiety to form the ligand-conjugated oligonucleotide. In some embodiments, the oligonucleotides or linked nucleosides of the present invention are synthesized by an automated synthesizer using phosphoramidites derived from ligand-nucleoside conjugates in addition to the standard phosphoramidites and non-standard phosphoramidites that are commercially available and routinely used in oligonucleotide synthesis.

[0552] A. Lipid Conjugates

[0553] In certain embodiments, the ligand or conjugate is a lipid or lipid-based molecule. Such a lipid or lipid-based molecule preferably binds a serum protein, e.g., human serum albumin (HSA). An HSA binding ligand allows for distribution of the conjugate to a target tissue, e.g., a non-kidney target tissue of the body. For example, the target tissue can be the liver, including parenchymal cells of the liver. Other molecules that can bind HSA can also be used as ligands. For example, naproxen or aspirin can be used. A lipid or lipid-based ligand can (a) increase resistance to degradation of the conjugate, (b) increase targeting or transport into a target cell or cell membrane, or (c) can be used to adjust binding to a serum protein, e.g., HSA.

[0554] A lipid based ligand can be used to inhibit, e.g., control the binding of the conjugate to a target tissue. For example, a lipid or lipid-based ligand that binds to HSA more strongly will be less likely to be targeted to the kidney and therefore less likely to be cleared from the body. A lipid or lipid-based ligand that binds to HSA less strongly can be used to target the conjugate to the kidney.

[0555] In certain embodiments, the lipid based ligand binds HSA. Preferably, it binds HSA with a sufficient affinity such that the conjugate will be preferably distributed to a non-kidney tissue. However, it is preferred that the affinity not be so strong that the HSA-ligand binding cannot be reversed.

[0556] In other embodiments, the lipid based ligand binds HSA weakly or not at all, such that the conjugate will be preferably distributed to the kidney. Other moieties that target to kidney cells can also be used in place of, or in addition to, the lipid based ligand.

[0557] In another aspect, the ligand is a moiety, e.g., a vitamin, which is taken up by a target cell, e.g., a proliferating cell. These are particularly useful for treating disorders characterized by unwanted cell proliferation, e.g., of the malignant or non-malignant type, e.g., cancer cells. Exemplary vitamins include vitamin A, E, and K. Other exemplary vitamins include are B vitamin, e.g., folic acid, B12, riboflavin, biotin, pyridoxal or other vitamins or nutrients taken up by target cells such as liver cells. Also included are HSA and low density lipoprotein (LDL).

[0558] B. Cell Permeation Agents

[0559] In another aspect, the ligand is a cell-permeation agent, preferably a helical cell-permeation agent. Preferably, the agent is amphipathic. An exemplary agent is a peptide such as tat or antennopedia. If the agent is a peptide, it can be modified, including a peptidylmimetic, invertomers, non-peptide or pseudo-peptide linkages, and use of D-amino acids. The helical agent is preferably an alpha-helical agent, which preferably has a lipophilic and a lipophobic phase.

[0560] The ligand can be a peptide or peptidomimetic. A peptidomimetic (also referred to herein as an oligopeptidomimetic) is a molecule capable of folding into a defined three-dimensional structure similar to a natural peptide. The attachment of peptide and peptidomimetics to iRNA agents can affect pharmacokinetic distribution of the iRNA, such as by enhancing cellular recognition and absorption. The peptide or peptidomimetic moiety can be about 5-50 amino acids long, e.g., about 5, 10, 15, 20, 25, 30, 35, 40, 45, or 50 amino acids long.

[0561] A peptide or peptidomimetic can be, for example, a cell permeation peptide, cationic peptide, amphipathic peptide, or hydrophobic peptide (e.g., consisting primarily of Tyr, Trp, or Phe). The peptide moiety can be a dendrimer peptide, constrained peptide or crosslinked peptide. In another alternative, the peptide moiety can include a hydrophobic membrane translocation sequence (MTS). An exemplary hydrophobic MTS-containing peptide is RFGF having the amino acid sequence AAVALLPAVLLALLAP (SEQ ID NO: 15). An RFGF analogue (e.g., amino acid sequence AALLPVLLAAP (SEQ ID NO:16) containing a hydrophobic MTS can also be a targeting moiety. The peptide moiety can be a “delivery” peptide, which can carry large polar molecules including peptides, oligonucleotides, and protein across cell membranes. For example, sequences from the HIV Tat protein (GRKKRRQRRRPPQ (SEQ ID NO:17) and the Drosophila Antennapedia protein (RQIKIWFQNRRMKWKK (SEQ ID NO:18) have been found to be capable of functioning as delivery peptides. A peptide or peptidomimetic can be encoded by a random sequence of DNA, such as a peptide identified from a phage-display library, or one-bead-one-compound (OBOC) combinatorial library (Lam et al., Nature, 354:82-84, 1991). Examples of a peptide or peptidomimetic tethered to a dsRNA agent via an incorporated monomer unit for cell targeting purposes is an arginine-glycine-aspartic acid (RGD)-peptide, or RGD mimic. A peptide moiety can range in length from about 5 amino acids to about 40 amino acids. The peptide moieties can have a structural modification, such as to increase stability or direct conformational properties. Any of the structural modifications described below can be utilized.

[0562] An RGD peptide for use in the compositions and methods of the invention may be linear or cyclic, and may be modified, e.g., glycosylated or methylated, to facilitate targeting to a specific tissue(s). RGD-containing peptides and peptidiomimemtics may include D-amino acids, as well as synthetic RGD mimics. In addition to RGD, one can use other moieties that target the integrin ligand. Preferred conjugates of this ligand target PECAM-1 or VEGF.

[0563] A “cell permeation peptide” is capable of permeating a cell, e.g., a microbial cell, such as a bacterial or fungal cell, or a mammalian cell, such as a human cell. A microbial cell-permeating peptide can be, for example, an α-helical linear peptide (e.g., LL-37 or Ceropin P1), a disulfide bond-containing peptide (e.g., α-defensin, β-defensin or bactenecin), or a peptide containing only one or two dominating amino acids (e.g., PR-39 or indolicidin). A cell permeation peptide can also include a nuclear localization signal (NLS). For example, a cell permeation peptide can be a bipartite amphipathic peptide, such as MPG, which is derived from the fusion peptide domain of HIV-1 gp41 and the NLS of SV40 large T antigen (Simeoni et al., Nucl. Acids Res. 31:2717-2724, 2003).

[0564] C. Carbohydrate Conjugates

[0565] In some embodiments of the compositions and methods of the invention, an iRNA further comprises a carbohydrate. The carbohydrate conjugated iRNA is advantageous for the in vivo delivery of nucleic acids, as well as compositions suitable for in vivo therapeutic use, as described herein. As used herein, “carbohydrate” refers to a compound which is either a carbohydrate per se made up of one or more monosaccharide units having at least 6 carbon atoms (which can be linear, branched or cyclic) with an oxygen, nitrogen or sulfur atom bonded to each carbon atom; or a compound having as a part thereof a carbohydrate moiety made up of one or more monosaccharide units each having at least six carbon atoms (which can be linear, branched or cyclic), with an oxygen, nitrogen or sulfur atom bonded to each carbon atom. Representative carbohydrates include the sugars (mono-, di-, tri-, and oligosaccharides containing from about 4, 5, 6, 7, 8, or 9 monosaccharide units), and polysaccharides such as starches, glycogen, cellulose and polysaccharide gums. Specific monosaccharides include C5 and above (e.g., C5, C6, C7, or C8) sugars; di- and trisaccharides include sugars having two or three monosaccharide units (e.g., C5, C6, C7, or C8).

[0566] In certain embodiments, a carbohydrate conjugate for use in the compositions and methods of the invention is a monosaccharide.

[0567] In certain embodiments, the monosaccharide is an N-acetylgalactosamine (GalNAc). GalNAc conjugates, which comprise one or more N-acetylgalactosamine (GalNAc) derivatives, are described, for example, in U.S. Pat. No. 8,106,022, the entire content of which is hereby incorporated herein by reference. In some embodiments, the GalNAc conjugate serves as a ligand that targets the iRNA to particular cells. In some embodiments, the GalNAc conjugate targets the iRNA to liver cells, e.g., by serving as a ligand for the asialoglycoprotein receptor of liver cells (e.g., hepatocytes).

[0568] In some embodiments, the carbohydrate conjugate comprises one or more GalNAc derivatives. The GalNAc derivatives may be attached via a linker, e.g., a bivalent or trivalent branched linker. In some embodiments the GalNAc conjugate is conjugated to the 3′ end of the sense strand. In some embodiments, the GalNAc conjugate is conjugated to the iRNA agent (e.g., to the 3′ end of the sense strand) via a linker, e.g., a linker as described herein. In some embodiments the GalNAc conjugate is conjugated to the 5′ end of the sense strand. In some embodiments, the GalNAc conjugate is conjugated to the iRNA agent (e.g., to the 5′ end of the sense strand) via a linker, e.g., a linker as described herein.

[0569] In certain embodiments of the invention, the GalNAc or GalNAc derivative is attached to an iRNA agent of the invention via a monovalent linker. In some embodiments, the GalNAc or GalNAc derivative is attached to an iRNA agent of the invention via a bivalent linker. In yet other embodiments of the invention, the GalNAc or GalNAc derivative is attached to an iRNA agent of the invention via a trivalent linker. In other embodiments of the invention, the GalNAc or GalNAc derivative is attached to an iRNA agent of the invention via a tetravalent linker.

[0570] In certain embodiments, the double stranded RNAi agents of the invention comprise one GalNAc or GalNAc derivative attached to the iRNA agent. In certain embodiments, the double stranded RNAi agents of the invention comprise a plurality (e.g., 2, 3, 4, 5, or 6) GalNAc or GalNAc derivatives, each independently attached to a plurality of nucleotides of the double stranded RNAi agent through a plurality of monovalent linkers.

[0571] In some embodiments, for example, when the two strands of an iRNA agent of the invention are part of one larger molecule connected by an uninterrupted chain of nucleotides between the 3′-end of one strand and the 5′-end of the respective other strand forming a hairpin loop comprising, a plurality of unpaired nucleotides, each unpaired nucleotide within the hairpin loop may independently comprise a GalNAc or GalNAc derivative attached via a monovalent linker. The hairpin loop may also be formed by an extended overhang in one strand of the duplex.

[0572] In some embodiments, for example, when the two strands of an iRNA agent of the invention are part of one larger molecule connected by an uninterrupted chain of nucleotides between the 3′-end of one strand and the 5′-end of the respective other strand forming a hairpin loop comprising, a plurality of unpaired nucleotides, each unpaired nucleotide within the hairpin loop may independently comprise a GalNAc or GalNAc derivative attached via a monovalent linker. The hairpin loop may also be formed by an extended overhang in one strand of the duplex.

[0573] In one embodiment, a carbohydrate conjugate for use in the compositions and methods of the invention is selected from the group consisting of:

[chemical structure]

[chemical structure]

[chemical structure]

[chemical structure]

[chemical structure]

[chemical structure]

[chemical structure]

[chemical structure]

[chemical structure]

[chemical structure]

[0574] In another embodiment, a carbohydrate conjugate for use in the compositions and methods of the invention is a monosaccharide. In one embodiment, the monosaccharide is an N-acetylgalactosamine, such as

[chemical structure]

[0575] In some embodiments, the RNAi agent is attached to the carbohydrate conjugate via a linker as shown in the following schematic, wherein X is O or S

[chemical structure]

[0576] In some embodiments, the RNAi agent is conjugated to L96 as defined in Table 1 and shown below:

[chemical structure]

[0577] Another representative carbohydrate conjugate for use in the embodiments described herein includes, but is not limited to,

[chemical structure]

when one of X or Y is an oligonucleotide, the other is a hydrogen.

[0578] In some embodiments, a suitable ligand is a ligand disclosed in WO 2019/055633, the entire contents of which are incorporated herein by reference. In one embodiment the ligand comprises the structure below:

[chemical structure]

[0579] In certain embodiments of the invention, the GalNAc or GalNAc derivative is attached to an iRNA agent of the invention via a monovalent linker. In some embodiments, the GalNAc or GalNAc derivative is attached to an iRNA agent of the invention via a bivalent linker. In yet other embodiments of the invention, the GalNAc or GalNAc derivative is attached to an iRNA agent of the invention via a trivalent linker.

[0580] In one embodiment, the double stranded RNAi agents of the invention comprise one or more GalNAc or GalNAc derivative attached to the iRNA agent. The GalNAc may be attached to any nucleotide via a linker on the sense strand or antisense strand. The GalNac may be attached to the 5′-end of the sense strand, the 3′ end of the sense strand, the 5′-end of the antisense strand, or the 3′-end of the antisense strand. In one embodiment, the GalNAc is attached to the 3′ end of the sense strand, e.g., via a trivalent linker.

[0581] In other embodiments, the double stranded RNAi agents of the invention comprise a plurality (e.g., 2, 3, 4, 5, or 6) GalNAc or GalNAc derivatives, each independently attached to a plurality of nucleotides of the double stranded RNAi agent through a plurality of linkers, e.g., monovalent linkers.

[0582] In some embodiments, for example, when the two strands of an iRNA agent of the invention is part of one larger molecule connected by an uninterrupted chain of nucleotides between the 3′-end of one strand and the 5′-end of the respective other strand forming a hairpin loop comprising, a plurality of unpaired nucleotides, each unpaired nucleotide within the hairpin loop may independently comprise a GalNAc or GalNAc derivative attached via a monovalent linker.

[0583] In some embodiments, the carbohydrate conjugate further comprises one or more additional ligands as described above, such as, but not limited to, a PK modulator or a cell permeation peptide.

[0584] Additional carbohydrate conjugates and linkers suitable for use in the present invention include those described in PCT Publication Nos. WO 2014/179620 and WO 2014/179627, the entire contents of each of which are incorporated herein by reference.

[0585] D. Linkers

[0586] In some embodiments, the conjugate or ligand described herein can be attached to an iRNA oligonucleotide with various linkers that can be cleavable or non-cleavable.

[0587] The term “linker” or “linking group” means an organic moiety that connects two parts of a compound, e.g., covalently attaches two parts of a compound. Linkers typically comprise a direct bond or an atom such as oxygen or sulfur, a unit such as NR8, C(O), C(O)NH, SO, SO₂, SO₂NH or a chain of atoms, such as, but not limited to, substituted or unsubstituted alkyl, substituted or unsubstituted alkenyl, substituted or unsubstituted alkynyl, arylalkyl, arylalkenyl, arylalkynyl, heteroarylalkyl, heteroarylalkenyl, heteroarylalkynyl, heterocyclylalkyl, heterocyclylalkenyl, heterocyclylalkynyl, aryl, heteroaryl, heterocyclyl, cycloalkyl, cycloalkenyl, alkylarylalkyl, alkylarylalkenyl, alkylarylalkynyl, alkenylarylalkyl, alkenylarylalkenyl, alkenylarylalkynyl, alkynylarylalkyl, alkynylarylalkenyl, alkynylarylalkynyl, alkylheteroarylalkyl, alkylheteroarylalkenyl, alkylheteroarylalkynyl, alkenylheteroarylalkyl, alkenylheteroarylalkenyl, alkenylheteroarylalkynyl, alkynylheteroarylalkyl, alkynylheteroarylalkenyl, alkynylheteroarylalkynyl, alkylheterocyclylalkyl, alkylheterocyclylalkenyl, alkylhererocyclylalkynyl, alkenylheterocyclylalkyl, alkenylheterocyclylalkenyl, alkenylheterocyclylalkynyl, alkynylheterocyclylalkyl, alkynylheterocyclylalkenyl, alkynylheterocyclylalkynyl, alkylaryl, alkenylaryl, alkynylaryl, alkylheteroaryl, alkenylheteroaryl, alkynylhereroaryl, which one or more methylenes can be interrupted or terminated by O, S, S(O), SO₂, N(R8), C(O), substituted or unsubstituted aryl, substituted or unsubstituted heteroaryl, or substituted or unsubstituted heterocyclic; where R8 is hydrogen, acyl, aliphatic, or substituted aliphatic. In one embodiment, the linker is about 1-24 atoms, 2-24, 3-24, 4-24, 5-24, 6-24, 6-18, 7-18, 8-18, 7-17, 8-17, 6-16, 7-17, or 8-16 atoms.

[0588] A cleavable linking group is one which is sufficiently stable outside the cell, but which upon entry into a target cell is cleaved to release the two parts the linker is holding together. In a preferred embodiment, the cleavable linking group is cleaved at least about 10 times, 20, times, 30 times, 40 times, 50 times, 60 times, 70 times, 80 times, 90 times, or more, or at least 100 times faster in a target cell or under a first reference condition (which can, e.g., be selected to mimic or represent intracellular conditions) than in the blood of a subject, or under a second reference condition (which can, e.g., be selected to mimic or represent conditions found in the blood or serum).

[0589] Cleavable linking groups are susceptible to cleavage agents, e.g., pH, redox potential, or the presence of degradative molecules. Generally, cleavage agents are more prevalent or found at higher levels or activities inside cells than in serum or blood. Examples of such degradative agents include: redox agents which are selected for particular substrates or which have no substrate specificity, including, e.g., oxidative or reductive enzymes or reductive agents such as mercaptans, present in cells, that can degrade a redox cleavable linking group by reduction; esterases; endosomes or agents that can create an acidic environment, e.g., those that result in a pH of five or lower; enzymes that can hydrolyze or degrade an acid cleavable linking group by acting as a general acid, peptidases (which can be substrate specific), and phosphatases.

[0590] A cleavable linkage group, such as a disulfide bond can be susceptible to pH. The pH of human serum is 7.4, while the average intracellular pH is slightly lower, ranging from about 7.1-7.3. Endosomes have a more acidic pH, in the range of 5.5-6.0, and lysosomes have an even more acidic pH at around 5.0. Some linkers will have a cleavable linking group that is cleaved at a preferred pH, thereby releasing a cationic lipid from the ligand inside the cell, or into the desired compartment of the cell.

[0591] A linker can include a cleavable linking group that is cleavable by a particular enzyme. The type of cleavable linking group incorporated into a linker can depend on the cell to be targeted. For example, a liver-targeting ligand can be linked to a cationic lipid through a linker that includes an ester group. Liver cells are rich in esterases, and therefore the linker will be cleaved more efficiently in liver cells than in cell types that are not esterase-rich. Other cell-types rich in esterases include cells of the lung, renal cortex, and testis.

[0592] Linkers that contain peptide bonds can be used when targeting cell types rich in peptidases, such as liver cells and synoviocytes.

[0593] In general, the suitability of a candidate cleavable linking group can be evaluated by testing the ability of a degradative agent (or condition) to cleave the candidate linking group. It will also be desirable to also test the candidate cleavable linking group for the ability to resist cleavage in the blood or when in contact with other non-target tissue. Thus, one can determine the relative susceptibility to cleavage between a first and a second condition, where the first is selected to be indicative of cleavage in a target cell and the second is selected to be indicative of cleavage in other tissues or biological fluids, e.g., blood or serum. The evaluations can be carried out in cell free systems, in cells, in cell culture, in organ or tissue culture, or in whole animals. It can be useful to make initial evaluations in cell-free or culture conditions and to confirm by further evaluations in whole animals. In preferred embodiments, useful candidate compounds are cleaved at least about 2, 4, 10, 20, 30, 40, 50, 60, 70, 80, 90, or 100 times faster in the cell (or under in vitro conditions selected to mimic intracellular conditions) as compared to blood or serum (or under in vitro conditions selected to mimic extracellular conditions).

[0594] i. Redox Cleavable Linking Groups

[0595] In certain embodiments, a cleavable linking group is a redox cleavable linking group that is cleaved upon reduction or oxidation. An example of reductively cleavable linking group is a disulphide linking group (—S—S—). To determine if a candidate cleavable linking group is a suitable “reductively cleavable linking group,” or for example is suitable for use with a particular iRNA moiety and particular targeting agent one can look to methods described herein. For example, a candidate can be evaluated by incubation with dithiothreitol (DTT), or other reducing agent using reagents know in the art, which mimic the rate of cleavage which would be observed in a cell, e.g., a target cell. The candidates can also be evaluated under conditions which are selected to mimic blood or serum conditions. In one, candidate compounds are cleaved by at most about 10% in the blood. In other embodiments, useful candidate compounds are degraded at least about 2, 4, 10, 20, 30, 40, 50, 60, 70, 80, 90, or about 100 times faster in the cell (or under in vitro conditions selected to mimic intracellular conditions) as compared to blood (or under in vitro conditions selected to mimic extracellular conditions). The rate of cleavage of candidate compounds can be determined using standard enzyme kinetics assays under conditions chosen to mimic intracellular media and compared to conditions chosen to mimic extracellular media.

[0596] ii. Phosphate-Based Cleavable Linking Groups

[0597] In certain embodiments, a cleavable linker comprises a phosphate-based cleavable linking group. A phosphate-based cleavable linking group is cleaved by agents that degrade or hydrolyze the phosphate group. An example of an agent that cleaves phosphate groups in cells are enzymes such as phosphatases in cells. Examples of phosphate-based linking groups are —O—P(O)(ORk)-O—, —O—P(S)(ORk)-O—, —O—P(S)(SRk)-O—, —S—P(O)(ORk)-O—, —O—P(O)(ORk)-S—, —S—P(O)(ORk)-S—, —O—P(S)(ORk)-S—, —S—P(S)(ORk)-O—, —O—P(O)(Rk)-O—, —O—P(S)(Rk)-O—, —S—P(O)(Rk)-O—, —S—P(S)(Rk)-O—, —S—P(O)(Rk)-S—, —O—P(S)(Rk)-S—, wherein Rk at each occurrence can be, independently, C1-C20 alkyl, C1-C20 haloalkyl, C6-C10 aryl, or C7-C12 aralkyl.. Exemplary embodiments include —O—P(O)(OH)—O—, —O—P(S)(OH)—O—, —O—P(S)(SH)—O—, —S—P(O)(OH)—O—, —O—P(O)(OH)—S—, —S—P(O)(OH)—S—, —O—P(S)(OH)—S—, —S—P(S)(OH)—O—, —O—P(O)(H)—O—, —O—P(S)(H)—O—, —S—P(O)(H)—O, —S—P(S)(H)—O—, —S—P(O)(H)—S—, and —O—P(S)(H)—S—. In certain embodiments a phosphate-based linking group is —O—P(O)(OH)—O—. These candidates can be evaluated using methods analogous to those described above.

[0598] iii. Acid Cleavable Linking Groups

[0599] In other embodiments, a cleavable linker comprises an acid cleavable linking group. An acid cleavable linking group is a linking group that is cleaved under acidic conditions. In preferred embodiments acid cleavable linking groups are cleaved in an acidic environment with a pH of about 6.5 or lower (e.g., about 6.0, 5.5, 5.0, or lower), or by agents such as enzymes that can act as a general acid. In a cell, specific low pH organelles, such as endosomes and lysosomes can provide a cleaving environment for acid cleavable linking groups. Examples of acid cleavable linking groups include but are not limited to hydrazones, esters, and esters of amino acids. Acid cleavable groups can have the general formula —C═NN—, C(O)O, or —OC(O). A preferred embodiment is when the carbon attached to the oxygen of the ester (the alkoxy group) is an aryl group, substituted alkyl group, or tertiary alkyl group such as dimethyl pentyl or t-butyl. These candidates can be evaluated using methods analogous to those described above.

[0600] iv. Ester-Based Linking Groups

[0601] In other embodiments, a cleavable linker comprises an ester-based cleavable linking group. An ester-based cleavable linking group is cleaved by enzymes such as esterases and amidases in cells. Examples of ester-based cleavable linking groups include, but are not limited to, esters of alkylene, alkenylene and alkynylene groups. Ester cleavable linking groups have the general formula —C(O)O—, or —OC(O)—. These candidates can be evaluated using methods analogous to those described above.

[0602] v. Peptide-Based Cleaving Groups

[0603] In yet other embodiments, a cleavable linker comprises a peptide-based cleavable linking group. A peptide-based cleavable linking group is cleaved by enzymes such as peptidases and proteases in cells. Peptide-based cleavable linking groups are peptide bonds formed between amino acids to yield oligopeptides (e.g., dipeptides, tripeptides etc.) and polypeptides. Peptide-based cleavable groups do not include the amide group (—C(O)NH—). The amide group can be formed between any alkylene, alkenylene or alkynelene. A peptide bond is a special type of amide bond formed between amino acids to yield peptides and proteins. The peptide based cleavage group is generally limited to the peptide bond (i.e., the amide bond) formed between amino acids yielding peptides and proteins and does not include the entire amide functional group. Peptide-based cleavable linking groups have the general formula —NHCHRAC(O)NHCHRBC(O)—, where RA and RB are the R groups of the two adjacent amino acids. These candidates can be evaluated using methods analogous to those described above.

[0604] In some embodiments, an iRNA of the invention is conjugated to a carbohydrate through a linker. Non-limiting examples of iRNA carbohydrate conjugates with linkers of the compositions and methods of the invention include, but are not limited to,

[chemical structure]

[chemical structure]

[chemical structure]

when one of X or Y is an oligonucleotide, the other is a hydrogen.

[0605] In certain embodiments of the compositions and methods of the invention, a ligand is one or more “GalNAc” (N-acetylgalactosamine) derivatives attached through a bivalent or trivalent branched linker.

[0606] In one embodiment, a dsRNA of the invention is conjugated to a bivalent or trivalent branched linker selected from the group of structures shown in any of formula (XLV)-(XLVI):

[chemical structure]

wherein:
[0607] q2A, q2B, q3A, q3B, q4A, q4B, q5A, q5B and q5C represent independently for each occurrence 0-20 and wherein the repeating unit can be the same or different;
[0608] P^{2A}, P^{2B}, P^{3A}, P^{3B}, P^{4A}, P^{4B}, P^{5A}, P^{5B}, P^{5C}, T^{2A}, T^{2B}, T^{3A}, T^{3B}, T^{4A}, T^{4B}, T^{4A}, T^{5B}, T^{5C} are each independently for each occurrence absent, CO, NH, O, S, OC(O), NHC(O), CH₂, CH₂NH or CH₂O;
[0609] Q^{2A}, Q^{2B}, Q^{3A}, Q^{3B}, Q^{4A}, Q^{4B}, Q^{5A}, Q^{5B}, Q^{5C} are independently for each occurrence absent, alkylene, substituted alkylene wherein one or more methylenes can be interrupted or terminated by one or more of O, S, S(O), SO₂, N(R^{N}), C(R′)═C(R″), C≡C or C(O);
[0610] R^{2A}, R^{2B}, R^{3A}, R^{3B}, R^{4A}, R^{4B}, R^{5A}, R^{5B}, R^{5C} are each independently for each occurrence absent NH, O, S, CH₂, C(O)O, C(O)NH, NHCH(R^{a})C(O), —C(O)—CH(R^{a})—NH—, CO, CH═N-O,

[chemical structure]

or heterocyclyl;
[0611] L^{2A}, L^{2B}, L^{3A}, L^{3B}, L^{4A}, L^{4B}, L^{5A}, L^{5B} and L^{5C} represent the ligand; i.e. each independently for each occurrence a monosaccharide (such as GalNAc), disaccharide, trisaccharide, tetrasaccharide, oligosaccharide, or polysaccharide; and R^{a} is H or amino acid side chain. Trivalent conjugating GalNAc derivatives are particularly useful for use with RNAi agents for inhibiting the expression of a target gene, such as those of formula (XLIX):

[chemical structure]

wherein L^{5A}, L^{5B} and L^{5C} represent a monosaccharide, such as GalNAc derivative.

[0612] Examples of suitable bivalent and trivalent branched linker groups conjugating GalNAc derivatives include, but are not limited to, the structures recited above as formulas II, VII, XI, X, and XIII.

[0613] Representative U.S. patents that teach the preparation of RNA conjugates include, but are not limited to, U.S. Pat. Nos. 4,828,979; 4,948,882; 5,218,105; 5,525,465; 5,541,313; 5,545,730; 5,552,538; 5,578,717, 5,580,731; 5,591,584; 5,109,124; 5,118,802; 5,138,045; 5,414,077; 5,486,603; 5,512,439; 5,578,718; 5,608,046; 4,587,044; 4,605,735; 4,667,025; 4,762,779; 4,789,737; 4,824,941; 4,835,263; 4,876,335; 4,904,582; 4,958,013; 5,082,830; 5,112,963; 5,214,136; 5,082,830; 5,112,963; 5,214,136; 5,245,022; 5,254,469; 5,258,506; 5,262,536; 5,272,250; 5,292,873; 5,317,098; 5,371,241, 5,391,723; 5,416,203, 5,451,463; 5,510,475; 5,512,667; 5,514,785; 5,565,552; 5,567,810; 5,574,142; 5,585,481; 5,587,371; 5,595,726; 5,597,696; 5,599,923; 5,599,928; 5,688,941; 6,294,664; 6,320,017; 6,576,752; 6,783,931; 6,900,297; 7,037,646; and 8,106,022, the entire contents of each of which are hereby incorporated herein by reference.

[0614] It is not necessary for all positions in a given compound to be uniformly modified, and in fact more than one of the aforementioned modifications can be incorporated in a single compound or even at a single nucleoside within an iRNA. The present invention also includes iRNA compounds that are chimeric compounds.

[0615] “Chimeric” iRNA compounds or “chimeras,” in the context of this invention, are iRNA compounds, preferably dsRNAi agents, that contain two or more chemically distinct regions, each made up of at least one monomer unit, i.e., a nucleotide in the case of a dsRNA compound. These iRNAs typically contain at least one region wherein the RNA is modified so as to confer upon the iRNA increased resistance to nuclease degradation, increased cellular uptake, or increased binding affinity for the target nucleic acid. An additional region of the iRNA can serve as a substrate for enzymes capable of cleaving RNA:DNA or RNA:RNA hybrids. By way of example, RNase H is a cellular endonuclease which cleaves the RNA strand of an RNA:DNA duplex. Activation of RNase H, therefore, results in cleavage of the RNA target, thereby greatly enhancing the efficiency of iRNA inhibition of gene expression. Consequently, comparable results can often be obtained with shorter iRNAs when chimeric dsRNAs are used, compared to phosphorothioate deoxy dsRNAs hybridizing to the same target region. Cleavage of the RNA target can be routinely detected by gel electrophoresis and, if necessary, associated nucleic acid hybridization techniques known in the art.

[0616] In certain instances, the RNA of an iRNA can be modified by a non-ligand group. A number of non-ligand molecules have been conjugated to iRNAs in order to enhance the activity, cellular distribution or cellular uptake of the iRNA, and procedures for performing such conjugations are available in the scientific literature. Such non-ligand moieties have included lipid moieties, such as cholesterol (Kubo, T. et al., Biochem. Biophys. Res. Comm., 2007, 365(1):54-61; Letsinger et al., Proc. Natl. Acad. Sci. USA, 1989, 86:6553), cholic acid (Manoharan et al., Bioorg. Med. Chem. Lett., 1994, 4:1053), a thioether, e.g., hexyl-S-tritylthiol (Manoharan et al., Ann. N.Y. Acad. Sci., 1992, 660:306; Manoharan et al., Bioorg. Med. Chem. Let., 1993, 3:2765), a thiocholesterol (Oberhauser et al., Nucl. Acids Res., 1992, 20:533), an aliphatic chain, e.g., dodecandiol or undecyl residues (Saison-Behmoaras et al., EMBO J., 1991, 10:111; Kabanov et al., FEBS Lett., 1990, 259:327; Svinarchuk et al., Biochimie, 1993, 75:49), a phospholipid, e.g., di-hexadecyl-rac-glycerol or triethylammonium 1,2-di-O-hexadecyl-rac-glycero-3-H-phosphonate (Manoharan et al., Tetrahedron Lett., 1995, 36:3651; Shea et al., Nucl. Acids Res., 1990, 18:3777), a polyamine or a polyethylene glycol chain (Manoharan et al., Nucleosides & Nucleotides, 1995, 14:969), or adamantane acetic acid (Manoharan et al., Tetrahedron Lett., 1995, 36:3651), a palmityl moiety (Mishra et al., Biochim. Biophys. Acta, 1995, 1264:229), or an octadecylamine or hexylamino-carbonyl-oxycholesterol moiety (Crooke et al., J. Pharmacol. Exp. Ther., 1996, 277:923). Representative United States patents that teach the preparation of such RNA conjugates have been listed above. Typical conjugation protocols involve the synthesis of RNAs bearing an aminolinker at one or more positions of the sequence. The amino group is then reacted with the molecule being conjugated using appropriate coupling or activating reagents. The conjugation reaction can be performed either with the RNA still bound to the solid support or following cleavage of the RNA, in solution phase. Purification of the RNA conjugate by HPLC typically affords the pure conjugate.

### IV. Delivery of an iRNA of the Invention

[0617] The delivery of an iRNA of the invention to a cell e.g., a cell within a subject, such as a human subject (e.g., a subject in need thereof, such as a subject susceptible to or diagnosed with a coagulation Factor X-associated disorder) can be achieved in a number of different ways. For example, delivery may be performed by contacting a cell with an iRNA of the invention either in vitro or in vivo. In vivo delivery may also be performed directly by administering a composition comprising an iRNA, e.g., a dsRNA, to a subject. Alternatively, in vivo delivery may be performed indirectly by administering one or more vectors that encode and direct the expression of the iRNA. These alternatives are discussed further below.

[0618] In general, any method of delivering a nucleic acid molecule (in vitro or in vivo) can be adapted for use with an iRNA of the invention (see e.g., Akhtar S. and Julian R L. (1992) Trends Cell. Biol. 2(5):139-144 and WO94/02595, which are incorporated herein by reference in their entireties). For in vivo delivery, factors to consider in order to deliver an iRNA molecule include, for example, biological stability of the delivered molecule, prevention of non-specific effects, and accumulation of the delivered molecule in the target tissue. RNA interference has also shown success with local delivery to the CNS by direct injection (Dorn, G., et al. (2004) Nucleic Acids 32:e49; Tan, P H., et al (2005) Gene Ther. 12:59-66; Makimura, H., et al (2002) BMC Neurosci. 3:18; Shishkina, G T., et al (2004) Neuroscience 129:521-528; Thakker, E R., et al (2004) Proc. Natl. Acad. Sci. U.S.A. 101:17270-17275; Akaneya, Y., et al (2005) J. Neurophysiol. 93:594-602). Modification of the RNA or the pharmaceutical carrier can also permit targeting of the iRNA to the target tissue and avoid undesirable off-target effects. iRNA molecules can be modified by chemical conjugation to lipophilic groups such as cholesterol to enhance cellular uptake and prevent degradation. For example, an iRNA directed against ApoB conjugated to a lipophilic cholesterol moiety was injected systemically into mice and resulted in knockdown of apoB mRNA in both the liver and jejunum (Soutschek, J., et al (2004) Nature 432:173-178).

[0619] In an alternative embodiment, the iRNA can be delivered using drug delivery systems such as a nanoparticle, a dendrimer, a polymer, liposomes, or a cationic delivery system. Positively charged cationic delivery systems facilitate binding of an iRNA molecule (negatively charged) and also enhance interactions at the negatively charged cell membrane to permit efficient uptake of an iRNA by the cell. Cationic lipids, dendrimers, or polymers can either be bound to an iRNA, or induced to form a vesicle or micelle (see e.g., Kim S H, et al (2008) Journal of Controlled Release 129(2):107-116) that encases an iRNA. The formation of vesicles or micelles further prevents degradation of the iRNA when administered systemically. Methods for making and administering cationic-iRNA complexes are well within the abilities of one skilled in the art (see e.g., Sorensen, D R, et al (2003) J. Mol. Biol 327:761-766; Verma, U N, et al (2003) Clin. Cancer Res. 9:1291-1300; Arnold, A S et al (2007) J. Hypertens. 25:197-205, which are incorporated herein by reference in their entirety). Some non-limiting examples of drug delivery systems useful for systemic delivery of iRNAs include DOTAP (Sorensen, D R., et al (2003), supra; Verma, U N, et al (2003), supra), “solid nucleic acid lipid particles” (Zimmermann, T S, et al (2006) Nature 441:111-114), cardiolipin (Chien, P Y, et al (2005) Cancer Gene Ther. 12:321-328; Pal, A, et al (2005) Int J. Oncol. 26:1087-1091), polyethyleneimine (Bonnet M E, et al (2008) Pharm. Res. August 16 Epub ahead of print; Aigner, A. (2006) J. Biomed. Biotechnol. 71659), Arg-Gly-Asp (RGD) peptides (Liu, S. (2006) Mol. Pharm. 3:472-487), and polyamidoamines (Tomalia, D A, et al (2007) Biochem. Soc. Trans. 35:61-67; Yoo, H., et al (1999) Pharm. Res. 16:1799-1804). In some embodiments, an iRNA forms a complex with cyclodextrin for systemic administration. Methods for administration and pharmaceutical compositions of iRNAs and cyclodextrins can be found in U.S. Pat. No. 7,427,605, which is herein incorporated by reference in its entirety.

[0620] A. Vector Encoded iRNAs of the Invention

[0621] iRNA targeting the coagulation Factor X gene can be expressed from transcription units inserted into DNA or RNA vectors (see, e.g., Couture, A, et al., TIG. (1996), 12:5-10; Skillern, A, et al., International PCT Publication No. WO 00/22113, Conrad, International PCT Publication No. WO 00/22114, and Conrad, U.S. Pat. No. 6,054,299). Expression can be transient (on the order of hours to weeks) or sustained (weeks to months or longer), depending upon the specific construct used and the target tissue or cell type. These transgenes can be introduced as a linear construct, a circular plasmid, or a viral vector, which can be an integrating or non-integrating vector. The transgene can also be constructed to permit it to be inherited as an extrachromosomal plasmid (Gassmann, et al., Proc. Natl. Acad. Sci. USA (1995) 92:1292).

[0622] Viral vector systems which can be utilized with the methods and compositions described herein include, but are not limited to, (a) adenovirus vectors; (b) retrovirus vectors, including but not limited to lentiviral vectors, moloney murine leukemia virus, etc.; (c) adeno-associated virus vectors; (d) herpes simplex virus vectors; (e) SV 40 vectors; (f) polyoma virus vectors; (g) papilloma virus vectors; (h) picornavirus vectors; (i) pox virus vectors such as an orthopox, e.g., vaccinia virus vectors or avipox, e.g. canary pox or fowl pox; and (j) a helper-dependent or gutless adenovirus. Replication-defective viruses can also be advantageous. Different vectors will or will not become incorporated into the cells' genome. The constructs can include viral sequences for transfection, if desired. Alternatively, the construct can be incorporated into vectors capable of episomal replication, e.g. EPV and EBV vectors. Constructs for the recombinant expression of an iRNA will generally require regulatory elements, e.g., promoters, enhancers, etc., to ensure the expression of the iRNA in target cells. Other aspects to consider for vectors and constructs are known in the art.

### V. Pharmaceutical Compositions of the Invention

[0623] The present invention also includes pharmaceutical compositions and formulations which include the iRNAs of the invention. In one embodiment, provided herein are pharmaceutical compositions containing an iRNA, as described herein, and a pharmaceutically acceptable carrier. The pharmaceutical compositions containing the iRNA are useful for preventing or treating a coagulation Factor X-associated disorder. Such pharmaceutical compositions are formulated based on the mode of delivery. One example is compositions that are formulated for systemic administration via parenteral delivery, e.g., by subcutaneous (SC), intramuscular (IM), or intravenous (IV) delivery. The pharmaceutical compositions of the invention may be administered in dosages sufficient to inhibit expression of a coagulation Factor X gene.

[0624] In some embodiments, the pharmaceutical compositions of the invention are sterile. In another embodiment, the pharmaceutical compositions of the invention are pyrogen free.

[0625] The pharmaceutical compositions of the invention may be administered in dosages sufficient to inhibit expression of a coagulation Factor X gene. In general, a suitable dose of an iRNA of the invention will be in the range of about 0.001 to about 200.0 milligrams per kilogram body weight of the recipient per day, generally in the range of about 1 to 50 mg per kilogram body weight per day. Typically, a suitable dose of an iRNA of the invention will be in the range of about 0.1 mg/kg to about 5.0 mg/kg, preferably about 0.3 mg/kg to about 3.0 mg/kg. A repeat-dose regimen may include administration of a therapeutic amount of iRNA on a regular basis, such as every month, once every 3-6 months, or once a year. In certain embodiments, the iRNA is administered about once per month to about once per six months.

[0626] After an initial treatment regimen, the treatments can be administered on a less frequent basis. Duration of treatment can be determined based on the severity of disease.

[0627] In other embodiments, a single dose of the pharmaceutical compositions can be long lasting, such that doses are administered at not more than 1, 2, 3, or 4 month intervals. In some embodiments of the invention, a single dose of the pharmaceutical compositions of the invention is administered about once per month. In other embodiments of the invention, a single dose of the pharmaceutical compositions of the invention is administered quarterly (i.e., about every three months). In other embodiments of the invention, a single dose of the pharmaceutical compositions of the invention is administered twice per year (i.e., about once every six months).

[0628] The skilled artisan will appreciate that certain factors can influence the dosage and timing required to effectively treat a subject, including but not limited to mutations present in the subject, previous treatments, the general health or age of the subject, and other diseases present. Moreover, treatment of a subject with a prophylactically or therapeutically effective amount, as appropriate, of a composition can include a single treatment or a series of treatments.

[0629] The iRNA can be delivered in a manner to target a particular tissue (e.g., hepatocytes).

[0630] Pharmaceutical compositions of the present invention include, but are not limited to, solutions, emulsions, and liposome-containing formulations. These compositions can be generated from a variety of components that include, but are not limited to, preformed liquids, self-emulsifying solids, and self-emulsifying semisolids. Formulations include those that target the liver.

[0631] The pharmaceutical formulations of the present invention, which can conveniently be presented in unit dosage form, can be prepared according to conventional techniques well known in the pharmaceutical industry. Such techniques include the step of bringing into association the active ingredients with the pharmaceutical carrier(s) or excipient(s). In general, the formulations are prepared by uniformly and intimately bringing into association the active ingredients with liquid carriers.

[0632] A. Additional Formulations

[0633] i. Emulsions

[0634] The compositions of the present invention can be prepared and formulated as emulsions. Emulsions are typically heterogeneous systems of one liquid dispersed in another in the form of droplets usually exceeding 0.1 μm in diameter (see e.g., Ansel's Pharmaceutical Dosage Forms and Drug Delivery Systems, Allen, L V., Popovich N G., and Ansel H-C., 2004, Lippincott Williams & Wilkins (8th ed.), New York, NY; Idson, in Pharmaceutical Dosage Forms, Lieberman, Rieger and Banker (Eds.), 1988, Marcel Dekker, Inc., New York, N.Y., volume 1, p. 199; Rosoff, in Pharmaceutical Dosage Forms, Lieberman, Rieger and Banker (Eds.), 1988, Marcel Dekker, Inc., New York, N.Y., Volume 1, p. 245; Block in Pharmaceutical Dosage Forms, Lieberman, Rieger and Banker (Eds.), 1988, Marcel Dekker, Inc., New York, N.Y., volume 2, p. 335; Higuchi et al., in Remington's Pharmaceutical Sciences, Mack Publishing Co., Easton, Pa., 1985, p. 301). Emulsions are often biphasic systems comprising two immiscible liquid phases intimately mixed and dispersed with each other. In general, emulsions can be of either the water-in-oil (w/o) or the oil-in-water (o/w) variety. When an aqueous phase is finely divided into and dispersed as minute droplets into a bulk oily phase, the resulting composition is called a water-in-oil (w/o) emulsion. Alternatively, when an oily phase is finely divided into and dispersed as minute droplets into a bulk aqueous phase, the resulting composition is called an oil-in-water (o/w) emulsion. Emulsions can contain additional components in addition to the dispersed phases, and the active drug which can be present as a solution either in the aqueous phase, oily phase or itself as a separate phase. Pharmaceutical excipients such as emulsifiers, stabilizers, dyes, and anti-oxidants can also be present in emulsions as needed. Pharmaceutical emulsions can also be multiple emulsions that are comprised of more than two phases such as, for example, in the case of oil-in-water-in-oil (o/w/o) and water-in-oil-in-water (w/o/w) emulsions. Such complex formulations often provide certain advantages that simple binary emulsions do not. Multiple emulsions in which individual oil droplets of an o/w emulsion enclose small water droplets constitute a w/o/w emulsion. Likewise a system of oil droplets enclosed in globules of water stabilized in an oily continuous phase provides an o/w/o emulsion.

[0635] Emulsions are characterized by little or no thermodynamic stability. Often, the dispersed or discontinuous phase of the emulsion is well dispersed into the external or continuous phase and maintained in this form through the means of emulsifiers or the viscosity of the formulation. Other means of stabilizing emulsions entail the use of emulsifiers that can be incorporated into either phase of the emulsion. Emulsifiers can broadly be classified into four categories: synthetic surfactants, naturally occurring emulsifiers, absorption bases, and finely dispersed solids (see e.g., Ansel's Pharmaceutical Dosage Forms and Drug Delivery Systems, Allen, L V., Popovich N G., and Ansel H C., 2004, Lippincott Williams & Wilkins (8th ed.), New York, NY; Idson, in Pharmaceutical Dosage Forms, Lieberman, Rieger and Banker (Eds.), 1988, Marcel Dekker, Inc., New York, N.Y., volume 1, p. 199).

[0636] Synthetic surfactants, also known as surface active agents, have found wide applicability in the formulation of emulsions and have been reviewed in the literature (see e.g., Ansel's Pharmaceutical Dosage Forms and Drug Delivery Systems, Allen, L V., Popovich N G., and Ansel H C., 2004, Lippincott Williams & Wilkins (8th ed.), New York, NY; Rieger, in Pharmaceutical Dosage Forms, Lieberman, Rieger and Banker (Eds.), 1988, Marcel Dekker, Inc., New York, N.Y., volume 1, p. 285; Idson, in Pharmaceutical Dosage Forms, Lieberman, Rieger and Banker (Eds.), Marcel Dekker, Inc., New York, N.Y., 1988, volume 1, p. 199). Surfactants are typically amphiphilic and comprise a hydrophilic and a hydrophobic portion. The ratio of the hydrophilic to the hydrophobic nature of the surfactant has been termed the hydrophile/lipophile balance (HLB) and is a valuable tool in categorizing and selecting surfactants in the preparation of formulations. Surfactants can be classified into different classes based on the nature of the hydrophilic group: nonionic, anionic, cationic, and amphoteric (see e.g., Ansel's Pharmaceutical Dosage Forms and Drug Delivery Systems, Allen, L V., Popovich N G., and Ansel H C., 2004, Lippincott Williams & Wilkins (8th ed.), New York, NY Rieger, in Pharmaceutical Dosage Forms, Lieberman, Rieger and Banker (Eds.), 1988, Marcel Dekker, Inc., New York, N.Y., volume 1, p. 285).

[0637] A large variety of non-emulsifying materials are also included in emulsion formulations and contribute to the properties of emulsions. These include fats, oils, waxes, fatty acids, fatty alcohols, fatty esters, humectants, hydrophilic colloids, preservatives, and antioxidants (Block, in Pharmaceutical Dosage Forms, Lieberman, Rieger and Banker (Eds.), 1988, Marcel Dekker, Inc., New York, N.Y., volume 1, p. 335; Idson, in Pharmaceutical Dosage Forms, Lieberman, Rieger and Banker (Eds.), 1988, Marcel Dekker, Inc., New York, N.Y., volume 1, p. 199).

[0638] The application of emulsion formulations via dermatological, oral, and parenteral routes, and methods for their manufacture have been reviewed in the literature (see e.g., Ansel's Pharmaceutical Dosage Forms and Drug Delivery Systems, Allen, L V., Popovich N G., and Ansel H C., 2004, Lippincott Williams & Wilkins (8th ed.), New York, NY; Idson, in Pharmaceutical Dosage Forms, Lieberman, Rieger and Banker (Eds.), 1988, Marcel Dekker, Inc., New York, N.Y., volume 1, p. 199).

[0639] ii. Microemulsions

[0640] In one embodiment of the present invention, the compositions of iRNAs and nucleic acids are formulated as microemulsions. A microemulsion can be defined as a system of water, oil, and amphiphile which is a single optically isotropic and thermodynamically stable liquid solution (see e.g., Ansel's Pharmaceutical Dosage Forms and Drug Delivery Systems, Allen, L V., Popovich N G., and Ansel H C., 2004, Lippincott Williams & Wilkins (8th ed.), New York, NY; Rosoff, in Pharmaceutical Dosage Forms, Lieberman, Rieger and Banker (Eds.), 1988, Marcel Dekker, Inc., New York, N.Y., volume 1, p. 245). Typically microemulsions are systems that are prepared by first dispersing an oil in an aqueous surfactant solution and then adding a sufficient amount of a fourth component, generally an intermediate chain-length alcohol to form a transparent system. Therefore, microemulsions have also been described as thermodynamically stable, isotropically clear dispersions of two immiscible liquids that are stabilized by interfacial films of surface-active molecules (Leung and Shah, in: Controlled Release of Drugs: Polymers and Aggregate Systems, Rosoff, M., Ed., 1989, VCH Publishers, New York, pages 185-215).

[0641] iii. Microparticles

[0642] An iRNA of the invention may be incorporated into a particle, e.g., a microparticle. Microparticles can be produced by spray-drying, but may also be produced by other methods including lyophilization, evaporation, fluid bed drying, vacuum drying, or a combination of these techniques.

[0643] iv. Penetration Enhancers

[0644] In one embodiment, the present invention employs various penetration enhancers to effect the efficient delivery of nucleic acids, particularly iRNAs, to the skin of animals. Most drugs are present in solution in both ionized and nonionized forms. However, usually only lipid soluble or lipophilic drugs readily cross cell membranes. It has been discovered that even non-lipophilic drugs can cross cell membranes if the membrane to be crossed is treated with a penetration enhancer. In addition to aiding the diffusion of non-lipophilic drugs across cell membranes, penetration enhancers also enhance the permeability of lipophilic drugs.

[0645] Penetration enhancers can be classified as belonging to one of five broad categories, i.e., surfactants, fatty acids, bile salts, chelating agents, and non-chelating non-surfactants (see e.g., Malmsten, M. Surfactants and polymers in drug delivery, Informa Health Care, New York, NY, 2002; Lee et al., Critical Reviews in Therapeutic Drug Carrier Systems, 1991, p. 92). Each of the above mentioned classes of penetration enhancers and their use in manufacture of pharmaceutical compositions and delivery of pharmaceutical agents are well known in the art.

[0646] v. Excipients

[0647] In contrast to a carrier compound, a “pharmaceutical carrier” or “excipient” is a pharmaceutically acceptable solvent, suspending agent, or any other pharmacologically inert vehicle for delivering one or more nucleic acids to an animal. The excipient can be liquid or solid and is selected, with the planned manner of administration in mind, so as to provide for the desired bulk, consistency, etc., when combined with a nucleic acid and the other components of a given pharmaceutical composition. Such agent are well known in the art.

[0648] vi. Other Components

[0649] The compositions of the present invention can additionally contain other adjunct components conventionally found in pharmaceutical compositions, at their art-established usage levels. Thus, for example, the compositions can contain additional, compatible, pharmaceutically-active materials such as, for example, antipruritics, astringents, local anesthetics or anti-inflammatory agents, or can contain additional materials useful in physically formulating various dosage forms of the compositions of the present invention, such as dyes, flavoring agents, preservatives, antioxidants, opacifiers, thickening agents and stabilizers. However, such materials, when added, should not unduly interfere with the biological activities of the components of the compositions of the present invention. The formulations can be sterilized and, if desired, mixed with auxiliary agents, e.g., lubricants, preservatives, stabilizers, wetting agents, emulsifiers, salts for influencing osmotic pressure, buffers, colorings, flavorings, or aromatic substances, and the like which do not deleteriously interact with the nucleic acid(s) of the formulation.

[0650] Aqueous suspensions can contain substances which increase the viscosity of the suspension including, for example, sodium carboxymethylcellulose, sorbitol, or dextran. The suspension can also contain stabilizers.

[0651] In some embodiments, pharmaceutical compositions featured in the invention include (a) one or more iRNA and (b) one or more agents which function by a non-iRNA mechanism and which are useful in treating a coagulation Factor X-associated disorder.

[0652] Toxicity and prophylactic efficacy of such compounds can be determined by standard pharmaceutical procedures in cell cultures or experimental animals, e.g., for determining the LD50 (the dose lethal to 50% of the population) and the ED50 (the dose prophylactically effective in 50% of the population). The dose ratio between toxic and therapeutic effects is the therapeutic index and it can be expressed as the ratio LD50/ED50. Compounds that exhibit high therapeutic indices are preferred.

[0653] The data obtained from cell culture assays and animal studies can be used in formulating a range of dosage for use in humans. The dosage of compositions featured herein in the invention lies generally within a range of circulating concentrations that include the ED50, preferably an ED80 or ED90, with little or no toxicity. The dosage can vary within this range depending upon the dosage form employed and the route of administration utilized. For any compound used in the methods featured in the invention, the prophylactically effective dose can be estimated initially from cell culture assays. A dose can be formulated in animal models to achieve a circulating plasma concentration range of the compound or, when appropriate, of the polypeptide product of a target sequence (e.g., achieving a decreased concentration of the polypeptide) that includes the IC50 (i.e., the concentration of the test compound which achieves a half-maximal inhibition of symptoms) or higher levels of inhibition as determined in cell culture. Such information can be used to more accurately determine useful doses in humans. Levels in plasma can be measured, for example, by high performance liquid chromatography.

[0654] In addition to their administration, as discussed above, the iRNAs featured in the invention can be administered in combination with other known agents used for the prevention or treatment of a coagulation Factor X-associated disorder. In any event, the administering physician can adjust the amount and timing of iRNA administration on the basis of results observed using standard measures of efficacy known in the art or described herein.

### VI. Methods for Inhibiting Coagulation Factor X Expression

[0655] The present invention also provides methods of inhibiting expression of an F10 gene in a cell. The methods include contacting a cell with an RNAi agent, e.g., double stranded RNA agent, in an amount effective to inhibit expression of F10 in the cell, thereby inhibiting expression of F10 in the cell.

[0656] Contacting of a cell with an iRNA, e.g., a double stranded RNA agent, may be done in vitro or in vivo. Contacting a cell in vivo with the iRNA includes contacting a cell or group of cells within a subject, e.g., a human subject, with the iRNA. Combinations of in vitro and in vivo methods of contacting a cell are also possible. Contacting a cell may be direct or indirect, as discussed above. Furthermore, contacting a cell may be accomplished via a targeting ligand, including any ligand described herein or known in the art. In preferred embodiments, the targeting ligand is a carbohydrate moiety, e.g., a GalNAc ligand, or any other ligand that directs the RNAi agent to a site of interest.

[0657] The term “inhibiting,” as used herein, is used interchangeably with “reducing,” “silencing,” “downregulating”, “suppressing”, and other similar terms, and includes any level of inhibition.

[0658] The phrase “inhibiting expression of a coagulation Factor X gene” is intended to refer to inhibition of expression of any coagulation Factor X gene (such as, e.g., a mouse coagulation Factor X gene, a rat coagulation Factor X gene, a monkey coagulation Factor X gene, or a human coagulation Factor X gene) as well as variants or mutants of a coagulation Factor X gene. Thus, the coagulation Factor X gene may be a wild-type coagulation Factor X gene, a mutant coagulation Factor X gene, or a transgenic coagulation Factor X gene in the context of a genetically manipulated cell, group of cells, or organism.

[0659] “Inhibiting expression of a coagulation Factor X gene” includes any level of inhibition of a coagulation Factor X gene, e.g., at least partial suppression of the expression of a coagulation Factor X gene, and preferably a clinically relevant level of suppression. The expression of the coagulation Factor X gene may be assessed based on the level, or the change in the level, of any variable associated with coagulation Factor X gene expression, e.g., coagulation Factor X mRNA level or coagulation Factor X protein level. Inhibition may be assessed by a decrease in an absolute or relative level of one or more of these variables compared with a control level. This level may be assessed in an individual cell or in a group of cells, including, for example, a sample derived from a subject. It is understood that coagulation Factor X is expressed predominantly in the liver, and is present in circulation.

[0660] Inhibition may be assessed by a decrease in an absolute or relative level of one or more variables that are associated with coagulation Factor X expression compared with a control level. The control level may be any type of control level that is utilized in the art, e.g., a pre-dose baseline level, or a level determined from a similar subject, cell, or sample that is untreated or treated with a control (such as, e.g., buffer only control or inactive agent control).

[0661] In some embodiments of the methods of the invention, expression of a coagulation Factor X gene is inhibited by at least 50%, 55%, 60%, 65%, 70%, 75%, 80%, 85%, 90%, or 95%, or to below the level of detection of the assay. In preferred embodiments, expression of a coagulation Factor X gene is inhibited by at least 70%. It is further understood that inhibition of coagulation Factor X expression in certain tissues, e.g., in gall bladder, without a significant inhibition of expression in other tissues, e.g., brain, may be desirable. In preferred embodiments, expression level is determined using the assay method provided in Example 2 with a 10 nM siRNA concentration in the appropriate species matched cell line.

[0662] In certain embodiments, inhibition of expression in vivo is determined by knockdown of the human gene in a rodent expressing the human gene, e.g., an AAV-infected mouse expressing the human target gene (i.e., coagulation Factor X), e.g., when administered as a single dose, e.g., at 3 mg/kg at the nadir of RNA expression. Knockdown of expression of an endogenous gene in a model animal system can also be determined, e.g., after administration of a single dose at, e.g., 3 mg/kg at the nadir of RNA expression. Such systems are useful when the nucleic acid sequence of the human gene and the model animal gene are sufficiently close such that the human iRNA provides effective knockdown of the model animal gene. RNA expression in liver is determined using the PCR methods provided in Example 2.

[0663] Inhibition of the expression of a coagulation Factor X gene may be manifested by a reduction of the amount of mRNA expressed by a first cell or group of cells (such cells may be present, for example, in a sample derived from a subject) in which a coagulation Factor X gene is transcribed and which has or have been treated (e.g., by contacting the cell or cells with an iRNA of the invention, or by administering an iRNA of the invention to a subject in which the cells are or were present) such that the expression of a coagulation Factor X gene is inhibited, as compared to a second cell or group of cells substantially identical to the first cell or group of cells but which has not or have not been so treated (control cell(s) not treated with an iRNA or not treated with an iRNA targeted to the gene of interest). In preferred embodiments, the inhibition is assessed by the method provided in Example 2 using, e.g., a 10 nM siRNA concentration in the species matched cell line and expressing the level of mRNA in treated cells as a percentage of the level of mRNA in control cells, using the following formula:

$$\\ \frac{( mRNA in control cells ) - ( mRNA in treated cells )}{( mRNA in control cells )} \cdot 100 \%$$

[0664] In other embodiments, inhibition of the expression of a coagulation Factor X gene may be assessed in terms of a reduction of a parameter that is functionally linked to coagulation Factor X gene expression, e.g., coagulation Factor X protein level in blood or serum from a subject. Coagulation Factor X gene silencing may be determined in any cell expressing coagulation Factor X, either endogenous or heterologous from an expression construct, and by any assay known in the art.

[0665] Inhibition of the expression of a coagulation Factor X protein may be manifested by a reduction in the level of the coagulation Factor X protein that is expressed by a cell or group of cells or in a subject sample (e.g., the level of protein in a blood sample derived from a subject). As explained above, for the assessment of mRNA suppression, the inhibition of protein expression levels in a treated cell or group of cells may similarly be expressed as a percentage of the level of protein in a control cell or group of cells, or the change in the level of protein in a subject sample, e.g., blood or serum derived therefrom.

[0666] A control cell, a group of cells, or subject sample that may be used to assess the inhibition of the expression of a coagulation Factor X gene includes a cell, group of cells, or subject sample that has not yet been contacted with an RNAi agent of the invention. For example, the control cell, group of cells, or subject sample may be derived from an individual subject (e.g., a human or animal subject) prior to treatment of the subject with an RNAi agent or an appropriately matched population control.

[0667] The level of coagulation Factor X mRNA that is expressed by a cell or group of cells may be determined using any method known in the art for assessing mRNA expression. In one embodiment, the level of expression of coagulation Factor X in a sample is determined by detecting a transcribed polynucleotide, or portion thereof, e.g., mRNA of the coagulation Factor X gene. RNA may be extracted from cells using RNA extraction techniques including, for example, using acid phenol/guanidine isothiocyanate extraction (RNAzol B; Biogenesis), RNeasy™ RNA preparation kits (Qiagen®) or PAXgene™ (PreAnalytix™, Switzerland). Typical assay formats utilizing ribonucleic acid hybridization include nuclear run-on assays, RT-PCR, RNase protection assays, northern blotting, in situ hybridization, and microarray analysis.

[0668] In some embodiments, the level of expression of coagulation Factor X is determined using a nucleic acid probe. The term “probe”, as used herein, refers to any molecule that is capable of selectively binding to a specific coagulation Factor X. Probes can be synthesized by one of skill in the art, or derived from appropriate biological preparations. Probes may be specifically designed to be labeled. Examples of molecules that can be utilized as probes include, but are not limited to, RNA, DNA, proteins, antibodies, and organic molecules.

[0669] Isolated mRNA can be used in hybridization or amplification assays that include, but are not limited to, Southern or northern analyses, polymerase chain reaction (PCR) analyses and probe arrays. One method for the determination of mRNA levels involves contacting the isolated mRNA with a nucleic acid molecule (probe) that can hybridize to coagulation Factor X mRNA. In one embodiment, the mRNA is immobilized on a solid surface and contacted with a probe, for example by running the isolated mRNA on an agarose gel and transferring the mRNA from the gel to a membrane, such as nitrocellulose. In an alternative embodiment, the probe(s) are immobilized on a solid surface and the mRNA is contacted with the probe(s), for example, in an Affymetrix® gene chip array. A skilled artisan can readily adapt known mRNA detection methods for use in determining the level of coagulation Factor X mRNA.

[0670] An alternative method for determining the level of expression of coagulation Factor X in a sample involves the process of nucleic acid amplification or reverse transcriptase (to prepare cDNA) of for example mRNA in the sample, e.g., by RT-PCR (the experimental embodiment set forth in Mullis, 1987, U.S. Pat. No. 4,683,202), ligase chain reaction (Barany (1991) Proc. Natl. Acad. Sci. USA 88:189-193), self sustained sequence replication (Guatelli et al. (1990) Proc. Natl. Acad. Sci. USA 87:1874-1878), transcriptional amplification system (Kwoh et al. (1989) Proc. Natl. Acad. Sci. USA 86:1173-1177), Q-Beta Replicase (Lizardi et al. (1988) Bio/Technology 6:1197), rolling circle replication (Lizardi et al., U.S. Pat. No. 5,854,033) or any other nucleic acid amplification method, followed by the detection of the amplified molecules using techniques well known to those of skill in the art. These detection schemes are especially useful for the detection of nucleic acid molecules if such molecules are present in very low numbers. In particular aspects of the invention, the level of expression of F10 is determined by quantitative fluorogenic RT-PCR (i.e., the TaqMan™ System). In some embodiments, expression level is determined by the method provided in Example 2 using, e.g., a 10 nM siRNA concentration, in the species matched cell line.

[0671] The expression levels of coagulation Factor X mRNA may be monitored using a membrane blot (such as used in hybridization analysis such as northern, Southern, dot, and the like), or microwells, sample tubes, gels, beads or fibers (or any solid support comprising bound nucleic acids). See U.S. Pat. Nos. 5,770,722, 5,874,219, 5,744,305, 5,677,195 and 5,445,934, which are incorporated herein by reference. The determination of coagulation Factor X expression level may also comprise using nucleic acid probes in solution.

[0672] In preferred embodiments, the level of mRNA expression is assessed using branched DNA (bDNA) assays or real time PCR (qPCR). The use of these methods is described and exemplified in the Examples presented herein. In preferred embodiments, expression level is determined by the method provided in Example 2 using a 10 nM siRNA concentration in the species matched cell line.

[0673] The level of F10 protein expression may be determined using any method known in the art for the measurement of protein levels. Such methods include, for example, electrophoresis, capillary electrophoresis, high performance liquid chromatography (HPLC), thin layer chromatography (TLC), hyperdiffusion chromatography, fluid or gel precipitin reactions, absorption spectroscopy, a colorimetric assays, spectrophotometric assays, flow cytometry, immunodiffusion (single or double), immunoelectrophoresis, western blotting, radioimmunoassay (RIA), enzyme-linked immunosorbent assays (ELISAs), immunofluorescent assays, electrochemiluminescence assays, and the like.

[0674] In some embodiments, the efficacy of the methods of the invention are assessed by a decrease in F10 mRNA or protein level (e.g., in a liver biopsy).

[0675] In some embodiments of the methods of the invention, the iRNA is administered to a subject such that the iRNA is delivered to a specific site within the subject. The inhibition of expression of coagulation Factor X may be assessed using measurements of the level or change in the level of coagulation Factor X mRNA or coagulation Factor X protein in a sample derived from fluid or tissue from the specific site within the subject (e.g., liver or blood).

[0676] As used herein, the terms detecting or determining a level of an analyte are understood to mean performing the steps to determine if a material, e.g., protein, RNA, is present. As used herein, methods of detecting or determining include detection or determination of an analyte level that is below the level of detection for the method used.

### VII. Prophylactic and Treatment Methods of the Invention

[0677] The present invention also provides methods of using an iRNA of the invention or a composition containing an iRNA of the invention to inhibit expression of coagulation Factor X, thereby preventing or treating a coagulation Factor X-associated disorder, e.g., a disorder associated with thrombosis.

[0678] In the methods of the invention the cell may be contacted with the siRNA in vitro or in vivo, i.e., the cell may be within a subject.

[0679] A cell suitable for treatment using the methods of the invention may be any cell that expresses a coagulation Factor X gene, e.g., a liver cell, a brain cell, a gall bladder cell, a heart cell, or a kidney cell, but preferably a liver cell. A cell suitable for use in the methods of the invention may be a mammalian cell, e.g., a primate cell (such as a human cell, including human cell in a chimeric non-human animal, or a non-human primate cell, e.g., a monkey cell or a chimpanzee cell), or a non-primate cell. In certain embodiments, the cell is a human cell, e.g., a human liver cell. In the methods of the invention, coagulation Factor X expression is inhibited in the cell by at least 50, 55, 60, 65, 70, 75, 80, 85, 90, or 95, or to a level below the level of detection of the assay.

[0680] The in vivo methods of the invention may include administering to a subject a composition containing an iRNA, where the iRNA includes a nucleotide sequence that is complementary to at least a part of an RNA transcript of the coagulation Factor X gene of the mammal to which the RNAi agent is to be administered. The composition can be administered by any means known in the art including, but not limited to oral, intraperitoneal, or parenteral routes, including intracranial (e.g., intraventricular, intraparenchymal, and intrathecal), intravenous, intramuscular, subcutaneous, transdermal, airway (aerosol), nasal, rectal, and topical (including buccal and sublingual) administration. In certain embodiments, the compositions are administered by intravenous infusion or injection. In certain embodiments, the compositions are administered by subcutaneous injection. In certain embodiments, the compositions are administered by intramuscular injection.

[0681] In some embodiments, the administration is via a depot injection. A depot injection may release the iRNA in a consistent way over a prolonged time period. Thus, a depot injection may reduce the frequency of dosing needed to obtain a desired effect, e.g., a desired inhibition of F10, or a therapeutic or prophylactic effect. A depot injection may also provide more consistent serum concentrations. Depot injections may include subcutaneous injections or intramuscular injections. In preferred embodiments, the depot injection is a subcutaneous injection.

[0682] In some embodiments, the administration is via a pump. The pump may be an external pump or a surgically implanted pump. In certain embodiments, the pump is a subcutaneously implanted osmotic pump. In other embodiments, the pump is an infusion pump. An infusion pump may be used for intravenous, subcutaneous, arterial, or epidural infusions. In preferred embodiments, the infusion pump is a subcutaneous infusion pump. In other embodiments, the pump is a surgically implanted pump that delivers the iRNA to the liver.

[0683] The mode of administration may be chosen based upon whether local or systemic treatment is desired and based upon the area to be treated. The route and site of administration may be chosen to enhance targeting.

[0684] In one aspect, the present invention also provides methods for inhibiting the expression of a coagulation Factor X gene in a mammal. The methods include administering to the mammal a composition comprising a dsRNA that targets a coagulation Factor X gene in a cell of the mammal and maintaining the mammal for a time sufficient to obtain degradation of the mRNA transcript of the coagulation Factor X gene, thereby inhibiting expression of the coagulation Factor X gene in the cell. Reduction in gene expression can be assessed by any methods known in the art and by methods, e.g. qRT-PCR, described herein, e.g., in Example 2. Reduction in protein production can be assessed by any methods known it the art, e.g. ELISA. In certain embodiments, a puncture liver biopsy sample serves as the tissue material for monitoring the reduction in the coagulation Factor X gene or protein expression. In other embodiments, a blood sample serves as the subject sample for monitoring the reduction in the coagulation Factor X protein expression.

[0685] The present invention further provides methods of treatment in a subject in need thereof, e.g., a subject diagnosed with a coagulation Factor X-associated disorder, such as a disorder associated with thrombosis.

[0686] The present invention further provides methods of prophylaxis in a subject in need thereof. The treatment methods of the invention include administering an iRNA of the invention to a subject, e.g., a subject that would benefit from a reduction of coagulation Factor X expression, in a prophylactically effective amount of an iRNA targeting a coagulation Factor X gene or a pharmaceutical composition comprising an iRNA targeting a coagulation Factor X gene.

[0687] An iRNA of the invention may be administered as a “free iRNA.” A free iRNA is administered in the absence of a pharmaceutical composition. The naked iRNA may be in a suitable buffer solution. The buffer solution may comprise acetate, citrate, prolamine, carbonate, or phosphate, or any combination thereof. In one embodiment, the buffer solution is phosphate buffered saline (PBS). The pH and osmolarity of the buffer solution containing the iRNA can be adjusted such that it is suitable for administering to a subject.

[0688] Alternatively, an iRNA of the invention may be administered as a pharmaceutical composition, such as a dsRNA liposomal formulation.

[0689] Subjects that would benefit from an inhibition of coagulation Factor X expression are subjects susceptible to or diagnosed with an F10-associated disorder, e.g., subjects susceptible to or diagnosed with, e.g., a disorder associated with thrombosis. Non-limiting examples of disorders or diseases associated with thrombosis include venous thrombosis, e.g., deep vein thrombosis; genetic thrombophilia, e.g., prothrombin thrombophilia; plurpura fulminans; acquired thrombophilia, e.g., antiphospholipid syndrome and systemic lupus erythematosus; drug induced thrombophilia; arterial thrombosis, e.g., myocardial infarction and peripheral arterial disease; thromboembolic disease, e.g., pulmonary embolus embolic and ischemic stroke; atrial fibrillation; post-surgery deep vein thrombosis; cancer thrombosis or infectious disease thrombosis.

[0690] In an embodiment, the method includes administering a composition featured herein such that expression of the target coagulation Factor X gene is decreased, such as for about 1, 2, 3, 4, 5, 6, 1-6, 1-3, or 3-6 months per dose. In certain embodiments, the composition is administered once every 3-6 months.

[0691] Preferably, the iRNAs useful for the methods and compositions featured herein specifically target RNAs (primary or processed) of the target coagulation Factor X gene. Compositions and methods for inhibiting the expression of these genes using iRNAs can be prepared and performed as described herein.

[0692] Administration of the iRNA according to the methods of the invention may result prevention or treatment of a coagulation Factor X-associated disorder, e.g., a disorder associated with thrombosis. Non-limiting examples of disorders or diseases associated with thrombosis include venous thrombosis, e.g., deep vein thrombosis; genetic thrombophilia, e.g., prothrombin thrombophilia; plurpura fulminans; acquired thrombophilia, e.g., antiphospholipid syndrome and systemic lupus erythematosus; drug induced thrombophilia; arterial thrombosis, e.g., myocardial infarction and peripheral arterial disease; thromboembolic disease, e.g., pulmonary embolus embolic and ischemic stroke; atrial fibrillation; post-surgery deep vein thrombosis; cancer thrombosis or infectious disease thrombosis.

[0693] Subjects can be administered a therapeutic amount of iRNA, such as about 0.01 mg/kg to about 200 mg/kg. Subjects can be administered a therapeutic amount of iRNA, such as about 5 mg to about 1000 mg as a fixed dose, regardless of body weight.

[0694] The iRNA is preferably administered subcutaneously, i.e., by subcutaneous injection. One or more injections may be used to deliver the desired dose of iRNA to a subject. The injections may be repeated over a period of time.

[0695] The administration may be repeated on a regular basis. In certain embodiments, after an initial treatment regimen, the treatments can be administered on a less frequent basis. A repeat-dose regimen may include administration of a therapeutic amount of iRNA on a regular basis, such as once per month to once a year. In certain embodiments, the iRNA is administered about once per month to about once every three months, or about once every three months to about once every six months.

[0696] The invention further provides methods and uses of an iRNA agent or a pharmaceutical composition thereof for treating a subject that would benefit from reduction or inhibition of F10 gene expression, e.g., a subject having an F10-associated disease, in combination with other pharmaceuticals or other therapeutic methods, e.g., with known pharmaceuticals or known therapeutic methods, such as, for example, those which are currently employed for treating these disorders.

[0697] In certain embodiments, the additional therapeutic agent is an anticoagulant. In some emboidments, the anticoagulant includes heparin, enoxaparin (Lovenox), dalteparin (Fragmin), fondaparinux (Arixtra), warfarin (Coumadin, Jantoven), dabigatran (Pradaxa), rivaroxaban (Xarelto), apixaban (Eliquis), edoxaban (Savaysa), argatroban or any combination thereof. In some embodiments, the additional therapeutic agent includes a thrombolytic. In certain embodiments, the thrombolytic includes antistreplase (Eminase), tissue plasminogen activator (tPA), urokinase-type plasminogen activator (uPA), or any combination thereof. In some embodiments, the additional therapeutic agent is an immunosuppressant. In certain embodiments, the immunosuppresant includes corticosteroid, azathioprine, cyclosporine A, or any combination thereof. In some embodiments, the additional therapeutic agent is hormone replacement therapy. In certain embodiments, the hormone replacement therapy includes estrogen, gestagen, androgen or any combination thereof. In some embodiments, the additional therapeutic agent is an antibiotic. In some embodiments, the additional therapeutic agent is an antihistamine agent. In some embodiments, the additional therapeutic agent is a mast cell stablizer. In certain embodiments, the mast cell stabilizer includes cromoglicic acid (Cromolyn), lodoxamide (Alomide), or any combination thereof. In some embodiments, the additional therapeutic agent is an anti-proliferative agent. In some embodiments, the additional therapeutic agent is an oral contraceptive. In some embodiments, the additional therapeutic agent is a fresh frozen plasma or a plasminogen concentrate. In some embodiments, the additional therapeutic agent is hyaluronidase. In some embodiments, the additional therapeutic agent is alpha chymotrypsin. In certain embodiment, the additional therapeutic agent is a filter inserted into a large vein that prevents clots that break loose from lodging in the patient's lungs. In certain embodiments, the additional therapeutic agent is selected from the group consisting of an anticoagulant, an F10 inhibitor and a thrombin inhibitor.

[0698] Accordingly, in some aspects of the invention, the methods which include either a single iRNA agent of the invention, further include administering to the subject one or more additional therapeutic agents. The iRNA agent and an additional therapeutic agent or treatment may be administered at the same time or in the same combination, e.g., parenterally, or the additional therapeutic agent can be administered as part of a separate composition or at separate times or by another method known in the art or described herein.

[0699] In one embodiment, an iRNA agent is administered in combination with allopurinol. In one embodiment, the iRNA agent is administered to the patient, and then the additional therapeutic agent is administered to the patient (or vice versa). In another embodiment, the iRNA agent and the additional therapeutic agent are administered at the same time.

[0700] The iRNA agent and an additional therapeutic agent or treatment may be administered at the same time or in the same combination, e.g., parenterally, or the additional therapeutic agent can be administered as part of a separate composition or at separate times or by another method known in the art or described herein.

### VIII. Kits

[0701] In certain aspects, the instant disclosure provides kits that include a suitable container containing a pharmaceutical formulation of a siRNA compound, e.g., a double-stranded siRNA compound, or ssiRNA compound, (e.g., a precursor, e.g., a larger siRNA compound which can be processed into a ssiRNA compound, or a DNA which encodes an siRNA compound, e.g., a double-stranded siRNA compound, or ssiRNA compound, or precursor thereof).

[0702] Such kits include one or more dsRNA agent(s) and instructions for use, e.g., instructions for administering a prophylactically or therapeutically effective amount of a dsRNA agent(s). The dsRNA agent may be in a vial or a pre-filled syringe. The kits may optionally further comprise means for administering the dsRNA agent (e.g., an injection device, such as a pre-filled syringe), or means for measuring the inhibition of F10 (e.g., means for measuring the inhibition of F10 mRNA, F10 protein, or F10 activity). Such means for measuring the inhibition of F10 may comprise a means for obtaining a sample from a subject, such as, e.g., a plasma sample. The kits of the invention may optionally further comprise means for determining the therapeutically effective or prophylactically effective amount.

[0703] In certain embodiments the individual components of the pharmaceutical formulation may be provided in one container, e.g., a vial or a pre-filled syringe. Alternatively, it may be desirable to provide the components of the pharmaceutical formulation separately in two or more containers, e.g., one container for a siRNA compound preparation, and at least another for a carrier compound. The kit may be packaged in a number of different configurations such as one or more containers in a single box. The different components can be combined, e.g., according to instructions provided with the kit. The components can be combined according to a method described herein, e.g., to prepare and administer a pharmaceutical composition. The kit can also include a delivery device.

[0704] This invention is further illustrated by the following examples which should not be construed as limiting. The entire contents of all references, patents and published patent applications cited throughout this application, as well as the informal Sequence Listing and Figures, are hereby incorporated herein by reference.

### EXAMPLES

### Example 1. iRNA Synthesis

### Source of Reagents

[0705] Where the source of a reagent is not specifically given herein, such reagent can be obtained from any supplier of reagents for molecular biology at a quality/purity standard for application in molecular biology.

siRNA Design

[0706] siRNAs targeting the Coagulation Factor X (F10) gene, (human: NCBI refseqID NM_000504.4; NCBI GenelD: 2159) were designed using custom R and Python scripts. The human NM_000504.4 REFSEQ mRNA has a length of 1536 bases.

[0707] A detailed list of the unmodified F10 sense and antisense strand nucleotide sequences are shown in Table 2. A detailed list of the modified F10 sense and antisense strand nucleotide sequences are shown in Table 3.

[0708] It is to be understood that, throughout the application, a duplex name without a decimal is equivalent to a duplex name with a decimal which merely references the batch number of the duplex. For example, AD-959917 is equivalent to AD-959917.1.

siRNA Synthesis

[0709] siRNAs were synthesized and annealed using routine methods known in the art.

[0710] Briefly, siRNA sequences were synthesized on a 1 μmol scale using a Mermade 192 synthesizer (BioAutomation) with phosphoramidite chemistry on solid supports. The solid support was controlled pore glass (500-1000 Å) loaded with a custom GalNAc ligand (3′-GalNAc conjugates), universal solid support (AM Chemicals), or the first nucleotide of interest. Ancillary synthesis reagents and standard 2-cyanoethyl phosphoramidite monomers (2′-deoxy-2′-fluoro, 2′-O-methyl, RNA, DNA) were obtained from Thermo-Fisher (Milwaukee, WI), Hongene (China), or Chemgenes (Wilmington, MA, USA). Additional phosphoramidite monomers were procured from commercial suppliers, prepared in-house, or procured using custom synthesis from various CMOs. Phosphoramidites were prepared at a concentration of 100 mM in either acetonitrile or 9:1 acetonitrile:DMF and were coupled using 5-Ethylthio-1H-tetrazole (ETT, 0.25 M in acetonitrile) with a reaction time of 400 s. Phosphorothioate linkages were generated using a 100 mM solution of 3-((Dimethylamino-methylidene) amino)-3H-1,2,4-dithiazole-3-thione (DDTT, obtained from Chemgenes (Wilmington, MA, USA)) in anhydrous acetonitrile/pyridine (9:1 v/v). Oxidation time was 5 minutes. All sequences were synthesized with final removal of the DMT group (“DMT-Off”).

[0711] Upon completion of the solid phase synthesis, solid-supported oligoribonucleotides were treated with 300 μL of Methylamine (40% aqueous) at room temperature in 96 well plates for approximately 2 hours to afford cleavage from the solid support and subsequent removal of all additional base-labile protecting groups. For sequences containing any natural ribonucleotide linkages (2′-OH) protected with a tert-butyl dimethyl silyl (TBDMS) group, a second deprotection step was performed using TEA·3HF (triethylamine trihydrofluoride). To each oligonucleotide solution in aqueous methylamine was added 200 μL of dimethyl sulfoxide (DMSO) and 300 μL TEA·3HF and the solution was incubated for approximately 30 mins at 60° C. After incubation, the plate was allowed to come to room temperature and crude oligonucleotides were precipitated by the addition of 1 mL of 9:1 acetontrile:ethanol or 1:1 ethanol:isopropanol. The plates were then centrifuged at 4° C. for 45 mins and the supernatant carefully decanted with the aid of a multichannel pipette. The oligonucleotide pellet was resuspended in 20 mM NaOAc and subsequently desalted using a HiTrap size exclusion column (5 mL, GE Healthcare) on an Agilent LC system equipped with an autosampler, UV detector, conductivity meter, and fraction collector. Desalted samples were collected in 96 well plates and then analyzed by LC-MS and UV spectrometry to confirm identity and quantify the amount of material, respectively.

[0712] Duplexing of single strands was performed on a Tecan liquid handling robot. Sense and antisense single strands were combined in an equimolar ratio to a final concentration of 10 μM in 1×PBS in 96 well plates, the plate sealed, incubated at 100° C. for 10 minutes, and subsequently allowed to return slowly to room temperature over a period of 2-3 hours. The concentration and identity of each duplex was confirmed and then subsequently utilized for in vitro screening assays.

### Example 2. In Vitro Screening Methods

### Cell Culture and 384-Well Transfections

[0713] HepG2 cells (ATCC, Manassas, VA) were grown to near confluence at 37° C. in an atmosphere of 5% CO₂ in Eagle's Minimum Essential Medium (Gibco) supplemented with 10% FBS (ATCC) before being released from the plate by trypsinization. Transfection was carried out by adding 14.8 μl of Opti-MEM plus 0.2 μl of Lipofectamine RNAiMax per well (Invitrogen, Carlsbad CA. cat #13778-150) to 5 μl of each siRNA duplex to an individual well in a 96-well plate. The mixture was then incubated at room temperature for 15 minutes. Eighty μl of complete growth media without antibiotic containing ˜2×10⁴ HepG2 cells were then added to the siRNA mixture. Cells were incubated for 24 hours prior to RNA purification. Single dose experiments were performed at 10 nM final duplex concentration.

Total RNA Isolation Using DYNABEADS mRNA Isolation Kit (Invitrogen™, Part #: 610-12)

[0714] Cells were lysed in 75 μl of Lysis/Binding Buffer containing 3 μL of beads per well and mixed for 10 minutes on an electrostatic shaker. The washing steps were automated on a Biotek EL406, using a magnetic plate support. Beads were washed (in 90 μL) once in Buffer A, once in Buffer B, and twice in Buffer E, with aspiration steps in between. Following a final aspiration, complete 10 μL RT mixture was added to each well, as described below.

cDNA Synthesis Using ABI High Capacity cDNA Reverse Transcription Kit (Applied Biosystems, Foster City, CA, Cat #4368813)

[0715] A master mix of 1 μl 10× Buffer, 0.4 μl 25× dNTPs, 1 μl Random primers, 0.5 μl Reverse Transcriptase, 0.5 μl RNase inhibitor and 6.6 μl of H₂O per reaction was added per well. Plates were sealed, agitated for 10 minutes on an electrostatic shaker, and then incubated at 37 degrees C. for 2 hours. Following this, the plates were agitated at 80 degrees C. for 8 minutes.

### Real Time PCR

[0716] Two microlitre (μl) of cDNA were added to a master mix containing 0.5 μl of human GAPDH TaqMan Probe (4326317E), 0.5 μl human F10 probe, 2 μl nuclease-free water and 5 μl Lightcycler 480 probe master mix (Roche Cat #04887301001) per well in a 384 well plates (Roche cat #04887301001). Real time PCR was done in a LightCycler480 Real Time PCR system (Roche).

[0717] To calculate relative fold change, data were analyzed using the ΔΔCt method and normalized to assays performed with cells transfected with 10 nM AD-1955, or mock transfected cells. ICsos are calculated using a 4 parameter fit model using XLFit and normalized to cells transfected with AD-1955 or mock-transfected. The sense and antisense sequences of AD-1955 are: sense: cuuAcGcuGAGuAcuucGAdTsdT (SEQ ID NO:19) and antisense UCGAAGuACUcAGCGuAAGdTsdT (SEQ ID NO:20).

TABLE 1
Abbreviations of nucleotide monomers used in nucleic acid sequence representation. It will
be understood that these monomers, when present in an oligonucleotide, are mutually linked by 5′-3'-
phosphodiester bonds; and it is understood that when the nucleotide contains a 2-fluoro modification,
then the fluoro replaces the hydroxy at that position in the parent nucleotide (i.e., it is a 2′-deoxy-2′-
fluoronucleotide).

| Abbrevia- | |
|---|---|
| tion | Nucleotide(s) |
| A | Adenosine-3′-phosphate |
| Ab | beta-L-adenosine-3′-phosphate |
| Abs | beta-L-adenosine-3′-phosphorothioate |
| Af | 2′-fluoroadenosine-3′-phosphate |
| Afs | 2′-fluoroadenosine-3′-phosphorothioate |
| As | adenosine-3′-phosphorothioate |
| C | cytidine-3′-phosphate |
| Cb | beta-L-cytidine-3′-phosphate |
| Cbs | beta-L-cytidine-3′-phosphorothioate |
| Cf | 2'-fluorocytidine-3′-phosphate |
| Cfs | 2'-fluorocytidine-3′-phosphorothioate |
| Cs | cytidine-3′-phosphorothioate |
| G | guanosine-3′-phosphate |
| Gb | beta-L-guanosine-3′-phosphate |
| Gbs | beta-L-guanosine-3′-phosphorothioate |
| Gf | 2'-fluoroguanosine-3′-phosphate |
| Gfs | 2'-fluoroguanosine-3′-phosphorothioate |
| Gs | guanosine-3′-phosphorothioate |
| T | 5'-methyluridine-3′-phosphate |
| Tf | 2'-fluoro-5-methyluridine-3′-phosphate |
| Tfs | 2'-fluoro-5-methyluridine-3′-phosphorothioate |
| Ts | 5-methyluridine-3′-phosphorothioate |
| U | Uridine-3′-phosphate |
| Uf | 2′-fluorouridine-3′-phosphate |
| Ufs | 2′-fluorouridine-3′-phosphorothioate |
| Us | uridine-3′-phosphorothioate |
| N | any nucleotide, modified or unmodified |
| a | 2′-O-methyladenosine-3′-phosphate |
| as | 2′-O-methyladenosine-3′-phosphorothioate |
| c | 2′-O-methylcytidine-3′-phosphate |
| cs | 2′-O-methylcytidine-3′-phosphorothioate |
| g | 2′-O-methylguanosine-3′-phosphate |
| gs | 2′-O-methylguanosine-3′-phosphorothioate |
| t | 2′-O-methyl-5-methyluridine-3′-phosphate |
| ts | 2′-O-methyl-5-methyluridine-3′-phosphorothioate |
| u | 2′-O-methyluridine-3′-phosphate |
| us | 2′-O-methyluridine-3′-phosphorothioate |
| s | phosphorothioate linkage |
| L10 | N-(cholesterylcarboxamidocaproyl)-4-hydroxyprolinol (Hyp-C6-Chol) |
| L96 | N-[tris(GalNac-alkyl)-amidodecanoyl)]-4-hydroxyprolinol |
| | (Hyp-(GalNAc-alkyl)3) |
| | [chemical structure] |
| Y34 | 2-hydroxymethyl-tetrahydrofurane-4-methoxy-3-phosphate (abasic 2′-OMe |
| | furanose) |
| Y44 | inverted abasic DNA (2-hydroxymethyl-tetrahydrofurane-5-phosphate) |
| (Agn) | Adenosine-glycol nucleic acid (GNA) |
| (Cgn) | Cytidine-glycol nucleic acid (GNA) |
| (Ggn) | Guanosine-glycol nucleic acid (GNA) |
| (Tgn) | Thymidine-glycol nucleic acid (GNA) S-Isomer |
| P | Phosphate |
| VP | Vinyl-phosphonate |
| dA | 2′-deoxyadenosine-3′-phosphate |
| dAs | 2′-deoxyadenosine-3′-phosphorothioate |
| dC | 2′-deoxycytidine-3′-phosphate |
| dCs | 2′-deoxycytidine-3′-phosphorothioate |
| dG | 2′-deoxyguanosine-3′-phosphate |
| dGs | 2′-deoxyguanosine-3′-phosphorothioate |
| dT | 2′-deoxythymidine-3′-phosphate |
| dTs | 2′-deoxythymidine-3′-phosphorothioate |
| dU | 2′-deoxyuridine |
| dUs | 2′-deoxyuridine-3′-phosphorothioate |
| (C2p) | cytidine-2′-phosphate |
| (G2p) | guanosine-2′-phosphate |
| (U2p) | uridine-2′-phosphate |
| (A2p) | adenosine-2′-phosphate |
| (Ahd) | 2′-O-hexadecyl-adenosine-3′-phosphate |
| (Ahd) | 2′-O-hexadecyl-adenosine-3′-phosphate |
| (Ahds) | 2′-O-hexadecyl-adenosine-3′-phosphorothioate |
| (Chd) | 2′-O-hexadecyl-cytidine-3′-phosphate |
| (Chds) | 2′-O-hexadecyl-cytidine-3'-phosphorothioate |
| (Ghd) | 2′-O-hexadecyl-guanosine-3′-phosphate |
| (Ghds) | 2′-O-hexadecyl-guanosine-3′-phosphorothioate |
| (Uhd) | 2′-O-hexadecyl-uridine-3′-phosphate |
| (Uhds) | 2′-O-hexadecyl-uridine-3′-phosphorothioate |

TABLE 2
Unmodified Sense and Antisense Strand Sequences of Coagulation Factor X dsRNA Agents

| | | | | | Start | End | | |
|---|---|---|---|---|---|---|---|---|
| | | SEQ | | SEQ | Site | Site | | |
| Duplex | Sense Sequence | ID | Antisense Sequence | ID | in NM_ | in NM_ | | |
| Name | 5′ to 3′ | NO: | 5′ to 3′ | NO: | 000504.4 | 000504.4 | Region | Exon |
| AD-1466276 | CUCCAGCAGCCUGUCCCAGUU | 21 | AACUGGGACAGGCUGCUGGAGCA | 111 | 6 | 28 | 5′UTR | 1 |
| AD-1466287 | UGUCCCAGUGAGGACAGGGAU | 22 | AUCCCUGUCCUCACUGGGACAGG | 112 | 17 | 39 | 5′UTR | 1 |
| AD-1466302 | AGGGACACAGUACUCGGCCAU | 23 | AUGGCCGAGUACUGUGUCCCUGU | 113 | 32 | 54 | 5′UTR | 1 |
| AD-1466325 | CCUCGUCCUGCUCAGUGCCUU | 24 | AAGGCACUGAGCAGGACGAGGUG | 114 | 73 | 95 | CDS | 1 |
| AD-1466349 | GAAAGUCUGUUCAUCCGCAGU | 25 | ACUGCGGAUGAACAGACUUUCCC | 115 | 119 | 141 | CDS | 1-2 |
| AD-1466363 | CCGCAGGGAGCAGGCCAACAU | 26 | AUGUUGGCCUGCUCCCUGCGGAU | 116 | 133 | 155 | CDS | 2 |
| AD-1466372 | GCAGGCCAACAACAUCCUGGU | 27 | ACCAGGAUGUUGUUGGCCUGCUC | 117 | 142 | 164 | CDS | 2 |
| AD-1466385 | AUCCUGGCGAGGGUCACGAGU | 28 | ACUCGUGACCCUCGCCAGGAUGU | 118 | 155 | 177 | CDS | 2 |
| AD-1466396 | UCACGAGGGCCAAUUCCUUUU | 29 | AAAAGGAAUUGGCCCUCGUGACC | 119 | 168 | 190 | CDS | 2 |
| AD-1466405 | CCAAUUCCUUUCUUGAAGAGU | 30 | ACUCUUCAAGAAAGGAAUUGGCC | 120 | 177 | 199 | CDS | 2 |
| AD-1466414 | UUCUUGAAGAGAUGAAGAAAU | 31 | AUUUCUUCAUCUCUUCAAGAAAG | 121 | 186 | 208 | CDS | 2 |
| AD-1466428 | AGAAAGGACACCUCGAAAGAU | 32 | AUCUUUCGAGGUGUCCUUUCUUC | 122 | 201 | 223 | CDS | 2 |
| AD-1466437 | ACCUCGAAAGAGAGUGCAUGU | 33 | ACAUGCACUCUCUUUCGAGGUGU | 123 | 210 | 232 | CDS | 2 |
| AD-1466450 | GUGCAUGGAAGAGACCUGCUU | 34 | AAGCAGGUCUCUUCCAUGCACUC | 124 | 223 | 245 | CDS | 2 |
| AD-1466462 | GACCUGCUCAUACGAAGAGGU | 35 | ACCUCUUCGUAUGAGCAGGUCUC | 125 | 235 | 257 | CDS | 2 |
| AD-1466475 | GAAGAGGCCCGCGAGGUCUUU | 36 | AAAGACCUCGCGGGCCUCUUCGU | 126 | 248 | 270 | CDS | 2 |
| AD-1466484 | CGCGAGGUCUUUGAGGACAGU | 37 | ACUGUCCUCAAAGACCUCGCGGG | 127 | 257 | 279 | CDS | 2 |
| AD-1466495 | UGAGGACAGCGACAAGACGAU | 38 | AUCGUCUUGUCGCUGUCCUCAAA | 128 | 268 | 290 | CDS | 2-3 |
| AD-1466504 | CGACAAGACGAAUGAAUUCUU | 39 | AAGAAUUCAUUCGUCUUGUCGCU | 129 | 277 | 299 | CDS | 2-3 |
| AD-1466513 | GAAUGAAUUCUGGAAUAAAUU | 40 | AAUUUAUUCCAGAAUUCAUUCGU | 130 | 286 | 308 | CDS | 2-3 |
| AD-1466522 | CUGGAAUAAAUACAAAGAUGU | 41 | ACAUCUUUGUAUUUAUUCCAGAA | 131 | 295 | 317 | CDS | 3-4 |
| AD-1466533 | ACAAAGAUGGCGACCAGUGUU | 42 | AACACUGGUCGCCAUCUUUGUAU | 132 | 306 | 328 | CDS | 3-4 |
| AD-1466543 | CGACCAGUGUGAGACCAGUCU | 43 | AGACUGGUCUCACACUGGUCGCC | 133 | 316 | 338 | CDS | 4 |
| AD-1466554 | AGACCAGUCCUUGCCAGAACU | 44 | AGUUCUGGCAAGGACUGGUCUCA | 134 | 327 | 349 | CDS | 4 |
| AD-1466564 | UUGCCAGAACCAGGGCAAAUU | 45 | AAUUUGCCCUGGUUCUGGCAAGG | 135 | 337 | 359 | CDS | 4 |
| AD-1466573 | CCAGGGCAAAUGUAAAGACGU | 46 | ACGUCUUUACAUUUGCCCUGGUU | 136 | 346 | 368 | CDS | 4 |
| AD-1466587 | ACACCUGCACCUGUUUAGAAU | 47 | AUUCUAAACAGGUGCAGGUGUAU | 137 | 378 | 400 | CDS | 4 |
| AD-1466596 | CCUGUUUAGAAGGAUUCGAAU | 48 | AUUCGAAUCCUUCUAAACAGGUG | 138 | 387 | 409 | CDS | 4 |
| AD-1466622 | AACUGUGAAUUAUUCACACGU | 49 | ACGUGUGAAUAAUUCACAGUUUU | 139 | 413 | 435 | CDS | 4-5 |
| AD-1466631 | UUAUUCACACGGAAGCUCUGU | 50 | ACAGAGCUUCCGUGUGAAUAAUU | 140 | 422 | 444 | CDS | 4-5 |
| AD-1466646 | CUCUGCAGCCUGGACAACGGU | 51 | ACCGUUGUCCAGGCUGCAGAGCU | 141 | 437 | 459 | CDS | 5 |
| AD-1466652 | UGUGACCAGUUCUGCCACGAU | 52 | AUCGUGGCAGAACUGGUCACAGU | 142 | 461 | 483 | CDS | 5 |
| AD-1466667 | CACGAGGAACAGAACUCUGUU | 53 | AACAGAGUUCUGUUCCUCGUGGC | 143 | 476 | 498 | CDS | 5 |
| AD-1466678 | GAACUCUGUGGUGUGCUCCUU | 54 | AAGGAGCACACCACAGAGUUCUG | 144 | 487 | 509 | CDS | 5 |
| AD-1466698 | CCUGGCUGACAACGGCAAGGU | 55 | ACCUUGCCGUUGUCAGCCAGGGU | 145 | 523 | 545 | CDS | 5 |
| AD-1466715 | AGGCCUGCAUUCCCACAGGGU | 56 | ACCCUGUGGGAAUGCAGGCCUUG | 146 | 540 | 562 | CDS | 5-6 |
| AD-1466724 | UGUGGGAAACAGACCCUGGAU | 57 | AUCCAGGGUCUGUUUCCCACAGG | 147 | 569 | 591 | CDS | 6 |
| AD-1466734 | AGACCCUGGAACGCAGGAAGU | 58 | ACUUCCUGCGUUCCAGGGUCUGU | 148 | 579 | 601 | CDS | 6 |
| AD-1466743 | AACGCAGGAAGAGGUCAGUGU | 59 | ACACUGACCUCUUCCUGCGUUCC | 149 | 588 | 610 | CDS | 6 |
| AD-1466763 | CUGACAGCAUCACAUGGAAGU | 60 | ACUUCCAUGUGAUGCUGUCAGGG | 150 | 639 | 661 | CDS | 6 |
| AD-1466772 | UCACAUGGAAGCCAUAUGAUU | 61 | AAUCAUAUGGCUUCCAUGUGAUG | 151 | 648 | 670 | CDS | 6 |
| AD-1466781 | AGCCAUAUGAUGCAGCCGACU | 62 | AGUCGGCUGCAUCAUAUGGCUUC | 152 | 657 | 679 | CDS | 6 |
| AD-1466796 | CUGCUUGACUUCAACCAGACU | 63 | AGUCUGGUUGAAGUCAAGCAGGU | 153 | 704 | 726 | CDS | 6 |
| AD-1466805 | UUCAACCAGACGCAGCCUGAU | 64 | AUCAGGCUGCGUCUGGUUGAAGU | 154 | 713 | 735 | CDS | 6 |
| AD-1466813 | CGACAACAACCUCACCAGGAU | 65 | AUCCUGGUGAGGUUGUUGUCGCC | 155 | 739 | 761 | CDS | 6 |
| AD-1466822 | CCUCACCAGGAUCGUGGGAGU | 66 | ACUCCCACGAUCCUGGUGAGGUU | 156 | 748 | 770 | CDS | 6 |
| AD-1466840 | AGGCCAGGAAUGCAAGGACGU | 67 | ACGUCCUUGCAUUCCUGGCCUCC | 157 | 766 | 788 | CDS | 6 |
| AD-1466851 | UGGCAGGCCCUGCUCAUCAAU | 68 | AUUGAUGAGCAGGGCCUGCCAGG | 158 | 797 | 819 | CDS | 6-7 |
| AD-1466860 | CUGCUCAUCAAUGAGGAAAAU | 69 | AUUUUCCUCAUUGAUGAGCAGGG | 159 | 806 | 828 | CDS | 7 |
| AD-1466869 | AAUGAGGAAAACGAGGGUUUU | 70 | AAAACCCUCGUUUUCCUCAUUGA | 160 | 815 | 837 | CDS | 7 |
| AD-1466878 | AACGAGGGUUUCUGUGGUGGU | 71 | ACCACCACAGAAACCCUCGUUUU | 161 | 824 | 846 | CDS | 7 |
| AD-1466887 | UUCUGUGGUGGAACCAUUCUU | 72 | AAGAAUGGUUCCACCACAGAAAC | 162 | 833 | 855 | CDS | 7 |
| AD-1466898 | AACCAUUCUGAGCGAGUUCUU | 73 | AAGAACUCGCUCAGAAUGGUUCC | 163 | 844 | 866 | CDS | 7 |
| AD-1466907 | GAGCGAGUUCUACAUCCUAAU | 74 | AUUAGGAUGUAGAACUCGCUCAG | 164 | 853 | 875 | CDS | 7 |
| AD-1466916 | CUACAUCCUAACGGCAGCCCU | 75 | AGGGCUGCCGUUAGGAUGUAGAA | 165 | 862 | 884 | CDS | 7 |
| AD-1466925 | AACGGCAGCCCACUGUCUCUU | 76 | AAGAGACAGUGGGCUGCCGUUAG | 166 | 871 | 893 | CDS | 7 |
| AD-1466934 | CCACUGUCUCUACCAAGCCAU | 77 | AUGGCUUGGUAGAGACAGUGGGC | 167 | 880 | 902 | CDS | 7 |
| AD-1466944 | UACCAAGCCAAGAGAUUCAAU | 78 | AUUGAAUCUCUUGGCUUGGUAGA | 168 | 890 | 912 | CDS | 7 |
| AD-1466954 | AGAGAUUCAAGGUGAGGGUAU | 79 | AUACCCUCACCUUGAAUCUCUUG | 169 | 900 | 922 | CDS | 7 |
| AD-1466989 | GAGGUGGAGGUGGUCAUCAAU | 80 | AUUGAUGACCACCUCCACCUCGU | 170 | 965 | 987 | CDS | 8 |
| AD-1466998 | GUGGUCAUCAAGCACAACCGU | 81 | ACGGUUGUGCUUGAUGACCACCU | 171 | 974 | 996 | CDS | 8 |
| AD-1467007 | AAGCACAACCGGUUCACAAAU | 82 | AUUUGUGAACCGGUUGUGCUUGA | 172 | 983 | 1005 | CDS | 8 |
| AD-1467022 | ACAAAGGAGACCUAUGACUUU | 83 | AAAGUCAUAGGUCUCCUUUGUGA | 173 | 998 | 1020 | CDS | 8 |
| AD-1467031 | ACCUAUGACUUCGACAUCGCU | 84 | AGCGAUGUCGAAGUCAUAGGUCU | 174 | 1007 | 1029 | CDS | 8 |
| AD-1467040 | UUCGACAUCGCCGUGCUCCGU | 85 | ACGGAGCACGGCGAUGUCGAAGU | 175 | 1016 | 1038 | CDS | 8 |
| AD-1467052 | AUCACCUUCCGCAUGAACGUU | 86 | AACGUUCAUGCGGAAGGUGAUGG | 176 | 1049 | 1071 | CDS | 8 |
| AD-1467076 | UGGGCCGAGUCCACGCUGAUU | 87 | AAUCAGCGUGGACUCGGCCCAGU | 177 | 1097 | 1119 | CDS | 8 |
| AD-1467088 | ACGCUGAUGACGCAGAAGACU | 88 | AGUCUUCUGCGUCAUCAGCGUGG | 178 | 1109 | 1131 | CDS | 8 |
| AD-1467122 | CAGUCCACCAGGCUCAAGAUU | 89 | AAUCUUGAGCCUGGUGGACUGCC | 179 | 1172 | 1194 | CDS | 8 |
| AD-1467131 | AGGCUCAAGAUGCUGGAGGUU | 90 | AACCUCCAGCAUCUUGAGCCUGG | 180 | 1181 | 1203 | CDS | 8 |
| AD-1467143 | CUGGAGGUGCCCUACGUGGAU | 91 | AUCCACGUAGGGCACCUCCAGCA | 181 | 1193 | 1215 | CDS | 8 |
| AD-1467154 | CUACGUGGACCGCAACAGCUU | 92 | AAGCUGUUGCGGUCCACGUAGGG | 182 | 1204 | 1226 | CDS | 8 |
| AD-1467163 | CCGCAACAGCUGCAAGCUGUU | 93 | AACAGCUUGCAGCUGUUGCGGUC | 183 | 1213 | 1235 | CDS | 8 |
| AD-1467172 | CUGCAAGCUGUCCAGCAGCUU | 94 | AAGCUGCUGGACAGCUUGCAGCU | 184 | 1222 | 1244 | CDS | 8 |
| AD-1467181 | GUCCAGCAGCUUCAUCAUCAU | 95 | AUGAUGAUGAAGCUGCUGGACAG | 185 | 1231 | 1253 | CDS | 8 |
| AD-1467196 | CAUCACCCAGAACAUGUUCUU | 96 | AAGAACAUGUUCUGGGUGAUGAU | 186 | 1246 | 1268 | CDS | 8 |
| AD-1467205 | GAACAUGUUCUGUGCCGGCUU | 97 | AAGCCGGCACAGAACAUGUUCUG | 187 | 1255 | 1277 | CDS | 8 |
| AD-1467219 | CCGGCUACGACACCAAGCAGU | 98 | ACUGCUUGGUGUCGUAGCCGGCA | 188 | 1269 | 1291 | CDS | 8 |
| AD-1467229 | CACCAAGCAGGAGGAUGCCUU | 99 | AAGGCAUCCUCCUGCUUGGUGUC | 189 | 1279 | 1301 | CDS | 8 |
| AD-1467250 | CCGCUUCAAGGACACCUACUU | 100 | AAGUAGGUGUCCUUGAAGCGGGU | 190 | 1330 | 1352 | CDS | 8 |
| AD-1467259 | GGACACCUACUUCGUGACAGU | 101 | ACUGUCACGAAGUAGGUGUCCUU | 191 | 1339 | 1361 | CDS | 8 |
| AD-1467271 | CGUGACAGGCAUCGUCAGCUU | 102 | AAGCUGACGAUGCCUGUCACGAA | 192 | 1351 | 1373 | CDS | 8 |
| AD-1467284 | UACGGGAUCUACACCAAGGUU | 103 | AACCUUGGUGUAGAUCCCGUACU | 193 | 1400 | 1422 | CDS | 8 |
| AD-1467293 | UACACCAAGGUCACCGCCUUU | 104 | AAAGGCGGUGACCUUGGUGUAGA | 194 | 1409 | 1431 | CDS | 8 |
| AD-1467307 | CGCCUUCCUCAAGUGGAUCGU | 105 | ACGAUCCACUUGAGGAAGGCGGU | 195 | 1423 | 1445 | CDS | 8 |
| AD-1467316 | CAAGUGGAUCGACAGGUCCAU | 106 | AUGGACCUGUCGAUCCACUUGAG | 196 | 1432 | 1454 | CDS | 8 |
| AD-1467325 | CGACAGGUCCAUGAAAACCAU | 107 | AUGGUUUUCAUGGACCUGUCGAU | 197 | 1441 | 1463 | CDS | 8 |
| AD-1467332 | UUGCCCAAGGCCAAGAGCCAU | 108 | AUGGCUCUUGGCCUUGGGCAAGC | 198 | 1466 | 1488 | CDS | 8 |
| AD-1467343 | UCAUAACGUCCUCUCCAUUAU | 109 | AUAAUGGAGAGGACGUUAUGACC | 199 | 1497 | 1519 | CDS | 8 |
| AD-1467352 | CCUCUCCAUUAAAGUGAGAUU | 110 | AAUCUCACUUUAAUGGAGAGGAC | 200 | 1506 | 1528 | CDS- | 8 |
| | | | | | | | 3′UTR | |

TABLE 3
Modified Sense and Antisense Strand Sequences of Coagulation Factor X dsRNA Agents

| | | SEQ | | SEQ | | SEQ |
|---|---|---|---|---|---|---|
| | | ID | | ID | | ID |
| Duplex Name | Sense Sequence 5′ to 3′ | NO: | Antisense Sequence 5′ to 3′ | NO: | mRNA Target Sequence | NO: |
| AD-1466276 | csusccagCfaGfCfCfugucccaguuL96 | 201 | asAfscugGfgAfCfaggcUfgCfuggagscsa | 291 | TGCTCCAGCAGCCTGTCCCAGTG | 381 |
| AD-1466287 | usgsucccAfgUfGfAfggacagggauL96 | 202 | asUfscccUfgUfCfcucaCfuGfggacasgsg | 292 | CCTGTCCCAGTGAGGACAGGGAC | 382 |
| AD-1466302 | asgsggacAfcAfGfUfacucggccauL96 | 203 | asUfsggcCfgAfGfuacuGfuGfucccusgsu | 293 | ACAGGGACACAGTACTCGGCCAC | 383 |
| AD-1466325 | cscsucguCfcUfGfCfucagugccuuL96 | 204 | asAfsggcAfcUfGfagcaGfgAfcgaggsusg | 294 | CACCTCGTCCTGCTCAGTGCCTC | 384 |
| AD-1466349 | gsasaaguCfuGfUfUfcauccgcaguL96 | 205 | asCfsugcGfgAfUfgaacAfgAfcuuucscsc | 295 | GGGAAAGTCTGTTCATCCGCAGG | 385 |
| AD-1466363 | cscsgcagGfgAfGfCfaggccaacauL96 | 206 | asUfsguuGfgCfCfugcuCfcCfugcggsasu | 296 | ATCCGCAGGGAGCAGGCCAACAA | 386 |
| AD-1466372 | gscsaggcCfaAfCfAfacauccugguL96 | 207 | asCfscagGfaUfGfuuguUfgGfccugcsusc | 297 | GAGCAGGCCAACAACATCCTGGC | 387 |
| AD-1466385 | asusccugGfcGfAfGfggucacgaguL96 | 208 | asCfsucgUfgAfCfccucGfcCfaggausgsu | 298 | ACATCCTGGCGAGGGTCACGAGG | 388 |
| AD-1466396 | uscsacgaGfgGfCfCfaauuccuuuuL96 | 209 | asAfsaagGfaAfUfuggcCfcUfcgugascsc | 299 | GGTCACGAGGGCCAATTCCTTTC | 389 |
| AD-1466405 | cscsaauuCfcUfUfUfcuugaagaguL96 | 210 | asCfsucuUfcAfAfgaaaGfgAfauuggscsc | 300 | GGCCAATTCCTTTCTTGAAGAGA | 390 |
| AD-1466414 | ususcuugAfaGfAfGfaugaagaaauL96 | 211 | asUfsuucUfuCfAfucucUfuCfaagaasasg | 301 | CTTTCTTGAAGAGATGAAGAAAG | 391 |
| AD-1466428 | asgsaaagGfaCfAfCfcucgaaagauL96 | 212 | asUfscuuUfcGfAfggugUfcCfuuucususc | 302 | GAAGAAAGGACACCTCGAAAGAG | 392 |
| AD-1466437 | ascscucgAfaAfGfAfgagugcauguL96 | 213 | asCfsaugCfaCfUfcucuUfuCfgaggusgsu | 303 | ACACCTCGAAAGAGAGTGCATGG | 393 |
| AD-1466450 | gsusgcauGfgAfAfGfagaccugcuuL96 | 214 | asAfsgcaGfgUfCfucuuCfcAfugcacsusc | 304 | GAGTGCATGGAAGAGACCTGCTC | 394 |
| AD-1466462 | gsasccugCfuCfAfUfacgaagagguL96 | 215 | asCfscucUfuCfGfuaugAfgCfaggucsusc | 305 | GAGACCTGCTCATACGAAGAGGC | 395 |
| AD-1466475 | gsasagagGfcCfCfGfcgaggucuuuL96 | 216 | asAfsagaCfcUfCfgcggGfcCfucuucsgsu | 306 | ACGAAGAGGCCCGCGAGGTCTTT | 396 |
| AD-1466484 | csgscgagGfuCfUfUfugaggacaguL96 | 217 | asCfsuguCfcUfCfaaagAfcCfucgcgsgsg | 307 | CCCGCGAGGTCTTTGAGGACAGC | 397 |
| AD-1466495 | usgsaggaCfaGfCfGfacaagacgauL96 | 218 | asUfscguCfuUfGfucgcUfgUfccucasasa | 308 | TTTGAGGACAGCGACAAGACGAA | 398 |
| AD-1466504 | csgsacaaGfaCfGfAfaugaauucuuL96 | 219 | asAfsgaaUfuCfAfuucgUfcUfugucgscsu | 309 | AGCGACAAGACGAATGAATTCTG | 399 |
| AD-1466513 | gsasaugaAfuUfCfUfggaauaaauuL96 | 220 | asAfsuuuAfuUfCfcagaAfuUfcauucsgsu | 310 | ACGAATGAATTCTGGAATAAATA | 400 |
| AD-1466522 | csusggaaUfaAfAfUfacaaagauguL96 | 221 | asCfsaucUfuUfGfuauuUfaUfuccagsasa | 311 | TTCTGGAATAAATACAAAGATGG | 401 |
| AD-1466533 | ascsaaagAfuGfGfCfgaccaguguuL96 | 222 | asAfscacUfgGfUfcgccAfuCfuuugusasu | 312 | ATACAAAGATGGCGACCAGTGTG | 402 |
| AD-1466543 | csgsaccaGfuGfUfGfagaccagucuL96 | 223 | asGfsacuGfgUfCfucacAfcUfggucgscsc | 313 | GGCGACCAGTGTGAGACCAGTCC | 403 |
| AD-1466554 | asgsaccaGfuCfCfUfugccagaacuL96 | 224 | asGfsuucUfgGfCfaaggAfcUfggucuscsa | 314 | TGAGACCAGTCCTTGCCAGAACC | 404 |
| AD-1466564 | ususgccaGfaAfCfCfagggcaaauuL96 | 225 | asAfsuuuGfcCfCfugguUfcUfggcaasgsg | 315 | CCTTGCCAGAACCAGGGCAAATG | 405 |
| AD-1466573 | cscsagggCfaAfAfUfguaaagacguL96 | 226 | asCfsgucUfuUfAfcauuUfgCfccuggsusu | 316 | AACCAGGGCAAATGTAAAGACGG | 406 |
| AD-1466587 | ascsaccuGfcAfCfCfuguuuagaauL96 | 227 | asUfsucuAfaAfCfagguGfcAfggugusasu | 317 | ATACACCTGCACCTGTTTAGAAG | 407 |
| AD-1466596 | cscsuguuUfaGfAfAfggauucgaauL96 | 228 | asUfsucgAfaUfCfcuucUfaAfacaggsusg | 318 | CACCTGTTTAGAAGGATTCGAAG | 408 |
| AD-1466622 | asascuguGfaAfUfUfauucacacguL96 | 229 | asCfsgugUfgAfAfuaauUfcAfcaguususu | 319 | AAAACTGTGAATTATTCACACGG | 409 |
| AD-1466631 | ususauucAfcAfCfGfgaagcucuguL96 | 230 | asCfsagaGfcUfUfccguGfuGfaauaasusu | 320 | AATTATTCACACGGAAGCTCTGC | 410 |
| AD-1466646 | csuscugcAfgCfCfUfggacaacgguL96 | 231 | asCfscguUfgUfCfcaggCfuGfcagagscsu | 321 | AGCTCTGCAGCCTGGACAACGGG | 411 |
| AD-1466652 | usgsugacCfaGfUfUfcugccacgauL96 | 232 | asUfscguGfgCfAfgaacUfgGfucacasgsu | 322 | ACTGTGACCAGTTCTGCCACGAG | 412 |
| AD-1466667 | csascgagGfaAfCfAfgaacucuguuL96 | 233 | asAfscagAfgUfUfcuguUfcCfucgugsgsc | 323 | GCCACGAGGAACAGAACTCTGTG | 413 |
| AD-1466678 | gsasacucUfgUfGfGfugugcuccuuL96 | 234 | asAfsggaGfcAfCfaccaCfaGfaguucsusg | 324 | CAGAACTCTGTGGTGTGCTCCTG | 414 |
| AD-1466698 | cscsuggcUfgAfCfAfacggcaagguL96 | 235 | asCfscuuGfcCfGfuuguCfaGfccaggsgsu | 325 | ACCCTGGCTGACAACGGCAAGGC | 415 |
| AD-1466715 | asgsgccuGfcAfUfUfcccacaggguL96 | 236 | asCfsccuGfuGfGfgaauGfcAfggccususg | 326 | CAAGGCCTGCATTCCCACAGGGC | 416 |
| AD-1466724 | usgsugggAfaAfCfAfgacccuggauL96 | 237 | asUfsccaGfgGfUfcuguUfuCfccacasgsg | 327 | CCTGTGGGAAACAGACCCTGGAA | 417 |
| AD-1466734 | asgsacccUfgGfAfAfcgcaggaaguL96 | 238 | asCfsuucCfuGfCfguucCfaGfggucusgsu | 328 | ACAGACCCTGGAACGCAGGAAGA | 418 |
| AD-1466743 | asascgcaGfgAfAfGfaggucaguguL96 | 239 | asCfsacuGfaCfCfucuuCfcUfgeguuscsc | 329 | GGAACGCAGGAAGAGGTCAGTGG | 419 |
| AD-1466763 | csusgacaGfcAfUfCfacauggaaguL96 | 240 | asCfsuucCfaUfGfugauGfcUfgucagsgsg | 330 | CCCTGACAGCATCACATGGAAGC | 420 |
| AD-1466772 | uscsacauGfgAfAfGfccauaugauuL96 | 241 | asAfsucaUfaUfGfgcuuCfcAfugugasusg | 331 | CATCACATGGAAGCCATATGATG | 421 |
| AD-1466781 | asgsccauAfuGfAfUfgcagccgacuL96 | 242 | asGfsucgGfcUfGfcaucAfuAfuggcususc | 332 | GAAGCCATATGATGCAGCCGACC | 422 |
| AD-1466796 | csusgcuuGfaCfUfUfcaaccagacuL96 | 243 | asGfsucuGfgUfUfgaagUfcAfagcagsgsu | 333 | ACCTGCTTGACTTCAACCAGACG | 423 |
| AD-1466805 | ususcaacCfaGfAfCfgcagccugauL96 | 244 | asUfscagGfcUfGfcgucUfgGfuugaasgsu | 334 | ACTTCAACCAGACGCAGCCTGAG | 424 |
| AD-1466813 | csgsacaaCfaAfCfCfucaccaggauL96 | 245 | asUfsccuGfgUfGfagguUfgUfugucgscsc | 335 | GGCGACAACAACCTCACCAGGAT | 425 |
| AD-1466822 | cscsucacCfaGfGfAfucgugggaguL96 | 246 | asCfsuccCfaCfGfauccUfgGfugaggsusu | 336 | AACCTCACCAGGATCGTGGGAGG | 426 |
| AD-1466840 | asgsgccaGfgAfAfUfgcaaggacguL96 | 247 | asCfsgucCfuUfGfcauuCfcUfggccuscsc | 337 | GGAGGCCAGGAATGCAAGGACGG | 427 |
| AD-1466851 | usgsgcagGfcCfCfUfgcucaucaauL96 | 248 | asUfsugaUfgAfGfcaggGfcCfugccasgsg | 338 | CCTGGCAGGCCCTGCTCATCAAT | 428 |
| AD-1466860 | csusgcucAfuCfAfAfugaggaaaauL96 | 249 | asUfsuuuCfcUfCfauugAfuGfagcagsgsg | 339 | CCCTGCTCATCAATGAGGAAAAC | 429 |
| AD-1466869 | asasugagGfaAfAfAfcgaggguuuuL96 | 250 | asAfsaacCfcUfCfguuuUfcCfucauusgsa | 340 | TCAATGAGGAAAACGAGGGTTTC | 430 |
| AD-1466878 | asascgagGfgUfUfUfcuguggugguL96 | 251 | asCfscacCfaCfAfgaaaCfcCfucguususu | 341 | AAAACGAGGGTTTCTGTGGTGGA | 431 |
| AD-1466887 | ususcuguGfgUfGfGfaaccauucuuL96 | 252 | asAfsgaaUfgGfUfuccaCfcAfcagaasasc | 342 | GTTTCTGTGGTGGAACCATTCTG | 432 |
| AD-1466898 | asasccauUfcUfGfAfgcgaguucuuL96 | 253 | asAfsgaaCfuCfGfcucaGfaAfugguuscsc | 343 | GGAACCATTCTGAGCGAGTTCTA | 433 |
| AD-1466907 | gsasgcgaGfuUfCfUfacauccuaauL96 | 254 | asUfsuagGfaUfGfuagaAfcUfcgcucsasg | 344 | CTGAGCGAGTTCTACATCCTAAC | 434 |
| AD-1466916 | csusacauCfcUfAfAfcggcagcccuL96 | 255 | asGfsggcUfgCfCfguuaGfgAfuguagsasa | 345 | TTCTACATCCTAACGGCAGCCCA | 435 |
| AD-1466925 | asascggcAfgCfCfCfacugucucuuL96 | 256 | asAfsgagAfcAfGfugggCfuGfccguusasg | 346 | CTAACGGCAGCCCACTGTCTCTA | 436 |
| AD-1466934 | cscsacugUfcUfCfUfaccaagccauL96 | 257 | asUfsggcUfuGfGfuagaGfaCfaguggsgsc | 347 | GCCCACTGTCTCTACCAAGCCAA | 437 |
| AD-1466944 | usasccaaGfcCfAfAfgagauucaauL96 | 258 | asUfsugaAfuCfUfcuugGfcUfugguasgsa | 348 | TCTACCAAGCCAAGAGATTCAAG | 438 |
| AD-1466954 | asgsagauUfcAfAfGfgugaggguauL96 | 259 | asUfsaccCfuCfAfccuuGfaAfucucususg | 349 | CAAGAGATTCAAGGTGAGGGTAG | 439 |
| AD-1466989 | gsasggugGfaGfGfUfggucaucaauL96 | 260 | asUfsugaUfgAfCfcaccUfcCfaccucsgsu | 350 | ACGAGGTGGAGGTGGTCATCAAG | 440 |
| AD-1466998 | gsusggucAfuCfAfAfgcacaaccguL96 | 261 | asCfsgguUfgUfGfcuugAfuGfaccacscsu | 351 | AGGTGGTCATCAAGCACAACCGG | 441 |
| AD-1467007 | asasgcacAfaCfCfGfguucacaaauL96 | 262 | asUfsuugUfgAfAfccggUfuGfugcuusgsa | 352 | TCAAGCACAACCGGTTCACAAAG | 442 |
| AD-1467022 | ascsaaagGfaGfAfCfcuaugacuuuL96 | 263 | asAfsaguCfaUfAfggucUfcCfuuugusgsa | 353 | TCACAAAGGAGACCTATGACTTC | 443 |
| AD-1467031 | ascscuauGfaCfUfUfcgacaucgcuL96 | 264 | asGfscgaUfgUfCfgaagUfcAfuagguscsu | 354 | AGACCTATGACTTCGACATCGCC | 444 |
| AD-1467040 | ususcgacAfuCfGfCfcgugcuccguL96 | 265 | asCfsggaGfcAfCfggcgAfuGfucgaasgsu | 355 | ACTTCGACATCGCCGTGCTCCGG | 445 |
| AD-1467052 | asuscaccUfuCfCfGfcaugaacguuL96 | 266 | asAfscguUfcAfUfgcggAfaGfgugausgsg | 356 | CCATCACCTTCCGCATGAACGTG | 446 |
| AD-1467076 | usgsggccGfaGfUfCfcacgcugauuL96 | 267 | asAfsucaGfcGfUfggacUfcGfgcccasgsu | 357 | ACTGGGCCGAGTCCACGCTGATG | 447 |
| AD-1467088 | ascsgcugAfuGfAfCfgcagaagacuL96 | 268 | asGfsucuUfcUfGfcgucAfuCfagcgusgsg | 358 | CCACGCTGATGACGCAGAAGACG | 448 |
| AD-1467122 | csasguccAfcCfAfGfgcucaagauuL96 | 269 | asAfsucuUfgAfGfccugGfuGfgacugscsc | 359 | GGCAGTCCACCAGGCTCAAGATG | 449 |
| AD-1467131 | asgsgcucAfaGfAfUfgcuggagguuL96 | 270 | asAfsccuCfcAfGfcaucUfuGfagccusgsg | 360 | CCAGGCTCAAGATGCTGGAGGTG | 450 |
| AD-1467143 | csusggagGfuGfCfCfcuacguggauL96 | 271 | asUfsccaCfgUfAfgggcAfcCfuccagscsa | 361 | TGCTGGAGGTGCCCTACGTGGAC | 451 |
| AD-1467154 | csusacguGfgAfCfCfgcaacagcuuL96 | 272 | asAfsgcuGfuUfGfcgguCfcAfcguagsgsg | 362 | CCCTACGTGGACCGCAACAGCTG | 452 |
| AD-1467163 | cscsgcaaCfaGfCfUfgcaagcuguuL96 | 273 | asAfscagCfuUfGfcagcUfgUfugeggsusc | 363 | GACCGCAACAGCTGCAAGCTGTC | 453 |
| AD-1467172 | csusgcaaGfcUfGfUfccagcagcuuL96 | 274 | asAfsgcuGfcUfGfgacaGfcUfugcagscsu | 364 | AGCTGCAAGCTGTCCAGCAGCTT | 454 |
| AD-1467181 | gsusccagCfaGfCfUfucaucaucauL96 | 275 | asUfsgauGfaUfGfaagcUfgCfuggacsasg | 365 | CTGTCCAGCAGCTTCATCATCAC | 455 |
| AD-1467196 | csasucacCfcAfGfAfacauguucuuL96 | 276 | asAfsgaaCfaUfGfuucuGfgGfugaugsasu | 366 | ATCATCACCCAGAACATGTTCTG | 456 |
| AD-1467205 | gsasacauGfuUfCfUfgugccggcuuL96 | 277 | asAfsgccGfgCfAfcagaAfcAfuguucsusg | 367 | CAGAACATGTTCTGTGCCGGCTA | 457 |
| AD-1467219 | cscsggcuAfcGfAfCfaccaagcaguL96 | 278 | asCfsugcUfuGfGfugucGfuAfgccggscsa | 368 | TGCCGGCTACGACACCAAGCAGG | 458 |
| AD-1467229 | csasccaaGfcAfGfGfaggaugccuuL96 | 279 | asAfsggcAfuCfCfuccuGfcUfuggugsusc | 369 | GACACCAAGCAGGAGGATGCCTG | 459 |
| AD-1467250 | cscsgcuuCfaAfGfGfacaccuacuuL96 | 280 | asAfsguaGfgUfGfuccuUfgAfagcggsgsu | 370 | ACCCGCTTCAAGGACACCTACTT | 460 |
| AD-1467259 | gsgsacacCfuAfCfUfucgugacaguL96 | 281 | asCfsuguCfaCfGfaaguAfgGfuguccsusu | 371 | AAGGACACCTACTTCGTGACAGG | 461 |
| AD-1467271 | csgsugacAfgGfCfAfucgucagcuuL96 | 282 | asAfsgcuGfaCfGfaugcCfuGfucacgsasa | 372 | TTCGTGACAGGCATCGTCAGCTG | 462 |
| AD-1467284 | usascgggAfuCfUfAfcaccaagguuL96 | 283 | asAfsccuUfgGfUfguagAfuCfccguascsu | 373 | AGTACGGGATCTACACCAAGGTC | 463 |
| AD-1467293 | usascaccAfaGfGfUfcaccgccuuuL96 | 284 | asAfsaggCfgGfUfgaccUfuGfguguasgsa | 374 | TCTACACCAAGGTCACCGCCTTC | 464 |
| AD-1467307 | csgsccuuCfcUfCfAfaguggaucguL96 | 285 | asCfsgauCfcAfCfuugaGfgAfaggcgsgsu | 375 | ACCGCCTTCCTCAAGTGGATCGA | 465 |
| AD-1467316 | csasagugGfaUfCfGfacagguccauL96 | 286 | asUfsggaCfcUfGfucgaUfcCfacuugsasg | 376 | CTCAAGTGGATCGACAGGTCCAT | 466 |
| AD-1467325 | csgsacagGfuCfCfAfugaaaaccauL96 | 287 | asUfsgguUfuUfCfauggAfcCfugucgsasu | 377 | ATCGACAGGTCCATGAAAACCAG | 467 |
| AD-1467332 | ususgcccAfaGfGfCfcaagagccauL96 | 288 | asUfsggcUfcUfUfggccUfuGfggcaasgsc | 378 | GCTTGCCCAAGGCCAAGAGCCAT | 468 |
| AD-1467343 | uscsauaaCfgUfCfCfucuccauuauL96 | 289 | asUfsaauGfgAfGfaggaCfgUfuaugascsc | 379 | GGTCATAACGTCCTCTCCATTAA | 469 |
| AD-1467352 | cscsucucCfaUfUfAfaagugagauuL96 | 290 | asAfsucuCfaCfUfuuaaUfgGfagaggsasc | 380 | GTCCTCTCCATTAAAGTGAGATC | 470 |

TABLE 4
Coagulation Factor X Single Dose Screens in HepG2 cells

10 nM

| | % mRNA | Std |
|---|---|---|
| Duplex ID | FX/GAPDH | Dev. |
| AD-1467352.1 | 12.936 | 0.653 |
| AD-1467343.1 | 13.519 | 0.329 |
| AD-1467332.1 | 69.905 | 4.679 |
| AD-1467325.1 | 10.462 | 0.975 |
| AD-1467316.1 | 22.068 | 1.667 |
| AD-1467307.1 | 56.66 | 16.408 |
| AD-1467293.1 | 55.665 | 6.659 |
| AD-1467284.1 | 73.705 | 7.801 |
| AD-1467271.1 | 17.478 | 3.42 |
| AD-1467259.1 | 20.344 | 2.412 |
| AD-1467250.1 | 21.298 | 1.372 |
| AD-1467229.1 | 43.591 | 1.696 |
| AD-1467219.1 | 65.738 | 6.259 |
| AD-1467205.1 | 12.767 | 1.439 |
| AD-1467196.1 | 14.695 | 1.694 |
| AD-1467181.1 | 11.969 | 1.067 |
| AD-1467172.1 | 89.42 | 19.017 |
| AD-1467163.1 | 46.661 | 6.537 |
| AD-1467154.1 | 44.761 | 5.006 |
| AD-1467143.1 | 53.716 | 6.529 |
| AD-1467131.1 | 63.787 | 2.809 |
| AD-1467122.1 | 101.684 | 6.379 |
| AD-1467088.1 | 53.234 | 4.189 |
| AD-1467076.1 | 38.477 | 2.423 |
| AD-1467052.1 | 65.016 | 7.034 |
| AD-1467040.1 | 33.242 | 6.01 |
| AD-1467031.1 | 13.612 | 2.488 |
| AD-1467022.1 | 8.799 | 0.803 |
| AD-1467007.1 | 83.829 | 9.757 |
| AD-1466998.1 | 18.477 | 3.085 |
| AD-1466989.1 | 12.367 | 1.293 |
| AD-1466954.1 | 97.59 | 6.588 |
| AD-1466944.1 | 19.614 | 1.719 |
| AD-1466934.1 | 18.566 | 1.557 |
| AD-1466925.1 | 29.694 | 3.292 |
| AD-1466916.1 | 70.88 | 11.554 |
| AD-1466907.1 | 11.921 | 1.328 |
| AD-1466898.1 | 28.4 | 4.788 |
| AD-1466887.1 | 34.24 | 3.116 |
| AD-1466878.1 | 15.253 | 1.322 |
| AD-1466869.1 | 14.327 | 1.874 |
| AD-1466860.1 | 12.413 | 0.189 |
| AD-1466851.1 | 109.235 | 20.417 |
| AD-1466840.1 | 86.841 | 3.003 |
| AD-1466822.1 | 24.666 | 4.127 |
| AD-1466813.1 | 34.689 | 13.973 |
| AD-1466805.1 | 37.606 | 2.071 |
| AD-1466796.1 | 25.86 | 2.891 |
| AD-1466781.1 | 20.114 | 7.02 |
| AD-1466772.1 | 20.838 | 5.179 |
| AD-1466763.1 | 70.129 | 15.241 |
| AD-1466743.1 | 45.094 | 4.245 |
| AD-1466734.1 | 112.444 | 7.14 |
| AD-1466724.1 | 97.2 | 10.271 |
| AD-1466715.1 | 132.553 | 7.027 |
| AD-1466698.1 | 126.76 | 6.206 |
| AD-1466678.1 | 39.949 | 10.599 |
| AD-1466667.1 | 17.512 | 3.998 |
| AD-1466652.1 | 14.033 | 3.971 |
| AD-1466646.1 | 59.362 | 13.544 |
| AD-1466631.1 | 80.224 | 2.647 |
| AD-1466622.1 | 58.482 | 3.034 |
| AD-1466596.1 | 6.125 | 0.609 |
| AD-1466587.1 | 7.928 | 1.021 |
| AD-1466573.1 | 15.202 | 2.442 |
| AD-1466564.1 | 11.998 | 1.805 |
| AD-1466554.1 | 8.003 | 1.098 |
| AD-1466543.1 | 45.376 | 3.57 |
| AD-1466533.1 | 15.364 | 8.261 |
| AD-1466522.1 | 19.986 | 10.804 |
| AD-1466513.1 | 6.101 | 0.71 |
| AD-1466504.1 | 4.885 | 0.534 |
| AD-1466495.1 | 8.853 | 1.371 |
| AD-1466484.1 | 6.85 | 0.591 |
| AD-1466475.1 | 71.862 | 3.748 |
| AD-1466462.1 | 15.679 | 2.466 |
| AD-1466450.1 | 8.963 | 2.263 |
| AD-1466437.1 | 13.391 | 6.017 |
| AD-1466428.1 | 6.773 | 0.596 |
| AD-1466414.1 | 5.436 | 0.679 |
| AD-1466405.1 | 13.941 | 0.852 |
| AD-1466396.1 | 52.023 | 3.473 |
| AD-1466385.1 | 92.59 | 1.916 |
| AD-1466372.1 | 18.512 | 2.8 |
| AD-1466363.1 | 15.199 | 0.62 |
| AD-1466349.1 | 12.287 | 0.847 |
| AD-1466325.1 | 10.085 | 0.902 |
| AD-1466302.1 | 40.989 | 10.019 |
| AD-1466287.1 | 100.146 | 3.454 |
| AD-1466276.1 | 89.38 | 4.09 |

Informal Sequence Listing

<210> 1
<211> 1536
<213> Homo sapiens
<400> 1

| | |
|---|---|
| gactttgctc cagcagcctg tcccagtgag gacagggaca cagtactcgg ccacaccatg | 60 |
| gggcgcccac tgcacctcgt cctgctcagt gcctccctgg ctggcctcct gctgctcggg | 120 |
| gaaagtctgt tcatccgcag ggagcaggcc aacaacatcc tggcgagggt cacgagggcc | 180 |
| aattcctttc ttgaagagat gaagaaagga cacctcgaaa gagagtgcat ggaagagacc | 240 |
| tgctcatacg aagaggcccg cgaggtcttt gaggacagcg acaagacgaa tgaattctgg | 300 |
| aataaataca aagatggcga ccagtgtgag accagtcctt gccagaacca gggcaaatgt | 360 |
| aaagacggcc tcggggaata cacctgcacc tgtttagaag gattcgaagg caaaaactgt | 420 |
| gaattattca cacggaagct ctgcagcctg gacaacgggg actgtgacca gttctgccac | 480 |
| gaggaacaga actctgtggt gtgctcctgc gcccgcgggt acaccctggc tgacaacggc | 540 |
| aaggcctgca ttcccacagg gccctacccc tgtgggaaac agaccctgga acgcaggaag | 600 |
| aggtcagtgg cccaggccac cagcagcagc ggggaggccc ctgacagcat cacatggaag | 660 |
| ccatatgatg cagccgacct ggaccccacc gagaacccct tcgacctgct tgacttcaac | 720 |
| cagacgcagc ctgagagggg cgacaacaac ctcaccagga tcgtgggagg ccaggaatgc | 780 |
| aaggacgggg agtgtccctg gcaggccctg ctcatcaatg aggaaaacga gggtttctgt | 840 |
| ggtggaacca ttctgagcga gttctacatc ctaacggcag cccactgtct ctaccaagcc | 900 |
| aagagattca aggtgagggt aggggaccgg aacacggagc aggaggaggg cggtgaggcg | 960 |
| gtgcacgagg tggaggtggt catcaagcac aaccggttca caaaggagac ctatgacttc | 1020 |
| gacatcgccg tgctccggct caagaccccc atcaccttcc gcatgaacgt ggcgcctgcc | 1080 |
| tgcctccccg agcgtgactg ggccgagtcc acgctgatga cgcagaagac ggggattgtg | 1140 |
| agcggcttcg ggcgcaccca cgagaagggc cggcagtcca ccaggctcaa gatgctggag | 1200 |
| gtgccctacg tggaccgcaa cagctgcaag ctgtccagca gcttcatcat cacccagaac | 1260 |
| atgttctgtg ccggctacga caccaagcag gaggatgcct gccaggggga cagcgggggc | 1320 |
| ccgcacgtca cccgcttcaa ggacacctac ttcgtgacag gcatcgtcag ctggggagag | 1380 |
| ggctgtgccc gtaaggggaa gtacgggatc tacaccaagg tcaccgcctt cctcaagtgg | 1440 |
| atcgacaggt ccatgaaaac caggggcttg cccaaggcca agagccatgc cccggaggtc | 1500 |
| ataacgtcct ctccattaaa gtgagatccc actcaa | 1536 |

<210> 2
<211> 1404
<212> DNA
<213> Homo sapiens
<400> 2

| | |
|---|---|
| gactttgctc cagcagcctg tcccagtgag gacagggaca cagtactcgg ccacaccatg | 60 |
| gggcgcccac tgcacctcgt cctgctcagt gcctccctgg ctggcctcct gctgctcggg | 120 |
| gaaagtctgt tcatccgcag ggagcaggcc aacaacatcc tggcgagggt cacgagggcc | 180 |
| aattcctttc ttgaagagat gaagaaagga cacctcgaaa gagagtgcat ggaagagacc | 240 |
| tgctcatacg aagaggcccg cgaggtcttt gaggacagcg acaagacgaa tgaattctgg | 300 |
| aataaataca aagatggcga ccagtgtgag accagtcctt gccagaacca gggcaaatgt | 360 |
| aaagacggcc tcggggaata cacctgcacc tgtttagaag gattcgaagg caaaaactgt | 420 |
| gaattatggc cctacccctg tgggaaacag accctggaac gcaggaagag gtcagtggcc | 480 |
| caggccacca gcagcagcgg ggaggcccct gacagcatca catggaagcc atatgatgca | 540 |
| gccgacctgg accccaccga gaaccccttc gacctgcttg acttcaacca gacgcagcct | 600 |
| gagaggggcg acaacaacct caccaggatc gtgggaggcc aggaatgcaa ggacggggag | 660 |
| tgtccctggc aggccctgct catcaatgag gaaaacgagg gtttctgtgg tggaaccatt | 720 |
| ctgagcgagt tctacatcct aacggcagcc cactgtctct accaagccaa gagattcaag | 780 |
| gtgagggtag gggaccggaa cacggagcag gaggagggcg gtgaggcggt gcacgaggtg | 840 |
| gaggtggtca tcaagcacaa ccggttcaca aaggagacct atgacttcga catcgccgtg | 900 |
| ctccggctca agacccccat caccttccgc atgaacgtgg cgcctgcctg cctccccgag | 960 |
| cgtgactggg ccgagtccac gctgatgacg cagaagacgg ggattgtgag cggcttcggg | 1020 |
| cgcacccacg agaagggccg gcagtccacc aggctcaaga tgctggaggt gccctacgtg | 1080 |
| gaccgcaaca gctgcaagct gtccagcagc ttcatcatca cccagaacat gttctgtgcc | 1140 |
| ggctacgaca ccaagcagga ggatgcctgc cagggggaca gcgggggccc gcacgtcacc | 1200 |
| cgcttcaagg acacctactt cgtgacaggc atcgtcagct ggggagaggg ctgtgcccgt | 1260 |
| aaggggaagt acgggatcta caccaaggtc accgccttcc tcaagtggat cgacaggtcc | 1320 |
| atgaaaacca ggggcttgcc caaggccaag agccatgccc cggaggtcat aacgtcctct | 1380 |
| ccattaaagt gagatcccac tcaa | 1404 |

<210> 3
<211> 1526
<213> Homo sapiens
<400> 3

| | |
|---|---|
| gactttgctc cagcagcctg tcccagtgag gacagggaca cagtactcgg ccacaccatg | 60 |
| gggcgcccac tgcacctcgt cctgctcagt gcctccctgg ctggcctcct gctgctcggg | 120 |
| gaaagtctgt tcatccgcag ggagcaggcc aacaacatcc tggcgagggt cacgagggcc | 180 |
| aattcctttc ttgaagagat gaagaaagga cacctcgaaa gagagtgcat ggaagagacc | 240 |
| tgctcatacg aagaggcccg cgaggtcttt gaggacagcg acaagacgaa tgaattctgg | 300 |
| aataaataca aagatggcga ccagtgtgag accagtcctt gccagaacca gggcaaatgt | 360 |
| aaagacggcc tcggggaata cacctgcacc tgtttagaag gattcgaagg caaaaactgt | 420 |
| gaattattca cacggaagct ctgcagcctg gacaacgggg actgtgacca gttctgccac | 480 |
| gaggaacaga actctgtggt gtgctcctgc gcccgcgggt acaccctggc tgacaacggc | 540 |
| aaggcctgca ttcccacagg gccctacccc tgtgggaaac agaccctgga acgcaggaag | 600 |
| aggtcagtgg cccaggccac cagcagcagc ggggaggccc ctgacagcat cacatggaag | 660 |
| ccatatgatg cagccgacct ggaccccacc gagaacccct tcgacctgct tgacttcaac | 720 |
| cagacgcagc ctgagagggg cgacaacaac ctcaccagga tcgtgggagg ccaggaatgc | 780 |
| aaggacgggg agtgtccctg gcaggccctg ctcatcaatg aggaaaacga gggtttctgt | 840 |
| ggtggaacca ttctgagcga gttctacatc ctaacggcag cccactgtct ctaccaagcc | 900 |
| aagagattca aggggaccgg aacacggagc aggaggaggg cggtgaggcg gtgcacgagg | 960 |
| tggaggtggt catcaagcac aaccggttca caaaggagac ctatgacttc gacatcgccg | 1020 |
| tgctccggct caagaccccc atcaccttcc gcatgaacgt ggcgcctgcc tgcctccccg | 1080 |
| agcgtgactg ggccgagtcc acgctgatga cgcagaagac ggggattgtg agcggcttcg | 1140 |
| ggcgcaccca cgagaagggc cggcagtcca ccaggctcaa gatgctggag gtgccctacg | 1200 |
| tggaccgcaa cagctgcaag ctgtccagca gcttcatcat cacccagaac atgttctgtg | 1260 |
| ccggctacga caccaagcag gaggatgcct gccaggggga cagcgggggc ccgcacgtca | 1320 |
| cccgcttcaa ggacacctac ttcgtgacag gcatcgtcag ctggggagag ggctgtgccc | 1380 |
| gtaaggggaa gtacgggatc tacaccaagg tcaccgcctt cctcaagtgg atcgacaggt | 1440 |
| ccatgaaaac caggggcttg cccaaggcca agagccatgc cccggaggtc ataacgtcct | 1500 |
| ctccattaaa gtgagatccc actcaa | 1526 |

<210> 4
<211> 2693
<212> DNA
<213> Mus musculus
<400> 4

| | |
|---|---|
| ggttcctgtt ccccaatagc tcagcctgtt tccgtgacta caatatatag ccattgtcca | 60 |
| agagacacat aaacctcaca cctacacctc tgcccgcccg gagtcagcag ggcccagcca | 120 |
| gaagattgag ggcttggatt caaatcccac atctgacctg acacccatgc tttgcctcat | 180 |
| gcctgtttca acttctgttc cttaaaacaa ggagggggga ctgacccctc taccagctgg | 240 |
| gaagcaggcc ctgcctggca gttctggata agggtagcct cccctagaaa ggctggggct | 300 |
| ggtcaccaca gtccccagtc ccctgacctc attgctggcc cagggctcca atcagaaggc | 360 |
| tgagataagc agaaggccca tggccacctg gggcccaggg tgagtgaacc ttgccccatg | 420 |
| cctgtcacag ccactgccgt ccttgaccac accatgggga gcccggtgca actcagcctg | 480 |
| ctctgtgttg tcctggccag cctcctgctc cctgggaaag gtgtgtttat taaccgggaa | 540 |
| cgtgccaaca atgtcctggc gaggactcgg agggcaaact cattttttga agagttcaag | 600 |
| aaaggaaatc tggaaagaga gtgtatggaa gaaatttgtt cttatgaaga ggtccgtgaa | 660 |
| atcttcgagg acgacgagaa gacgaaagaa tactggacca aatataaaga cggcgaccag | 720 |
| tgtgaaagca gcccttgcca gaaccaagga gcgtgtcgag atggcatcgg gggttacacg | 780 |
| tgcacctgct cggagggatt tgaaggcaaa aactgtgagc tctttgttcg gaaactctgc | 840 |
| cgcctagaca acggagactg tgaccagttc tgcagagaag agcagaactc agtggtgtgc | 900 |
| tcctgcgcca gcggttactt cctgggtaat gatggcaagt cttgcatctc cacagctccc | 960 |
| ttcccctgtg gaaaaatcac tacaggacgt aggaagaggt ctgtggccct aaacaccagc | 1020 |
| gacagtgagc ttgaccttga agacgccctg cttgatgagg atttcctgtc ccctacggag | 1080 |
| aatcctattg aactgctcaa cctcaacgag acacagcctg agaggagcag cgatgacctt | 1140 |
| gttcggattg tgggtggccg ggaatgcaag gatggagaat gtccctggca ggctctgctc | 1200 |
| attaacgaag acaatgaagg gttctgtggg ggcaccatct tgaatgagtt ctacatcctc | 1260 |
| actgctgccc actgtctcca tcaggccagg cgattcaagg tgagggtagg tgatcggaac | 1320 |
| acagagaagg aagaaggcaa cgagatggtg cacgaggtgg acgtggtcat taagcacaac | 1380 |
| aagtttcaga gggacaccta cgactatgat atcgccgtgc tgaggctgaa gactcccatc | 1440 |
| acgttccgga tgaacgtggc ccctgcctgc ctgcctcaga aagactgggc cgagtccaca | 1500 |
| ctgatgacac agaagacggg catcgtgagc gggtttggac gcacgcatga gaagggccgc | 1560 |
| cagtcgaaca tcctgaagat gctggaggta ccctacgtgg atcgcaacac ctgcaagctc | 1620 |
| tccaccagct tcagcatcac acagaatatg ttctgtgcgg gctatgaggc caagttagag | 1680 |
| gatgcctgcc agggggacag tggtggcccc catgtcacac ggttcaaaaa tacctactat | 1740 |
| gtgaccggca ttgtcagctg gggagagggg tgtgcaagga aagggaaata tggcatctac | 1800 |
| acaaaggtca cgaccttcct caagtggatt gacaggtcca tgaaagccag ggtgggaccc | 1860 |
| acagccgaga ccccaaggac agcaggtccg cccaattaaa gcagtccttc tccagtcctg | 1920 |
| ctgggtcaca tctggtgttg tttaatgttg ccaccttaaa caggaatgtt cttggggcag | 1980 |
| ctgccccacc tgtggtgggg tcttttccct cagtcttatt tcccttgact tcatggtata | 2040 |
| cgaaacgggc tgcagccggg cagtggtggc acacaccttt aatctcagca ctcaggaggc | 2100 |
| agagacaggc agatttctga atttgaggcc agactggtct acagagtgag ttccaggaca | 2160 |
| gccagggcta cacagagaaa ccctgtctca aaaaatgaat gaacgaacaa acgaacgaac | 2220 |
| aaacaaatga acgaaagaaa gaaagaaaga aagaaagaaa gaaagaaaga aaggaaggaa | 2280 |
| ggaaggaagg aaggaaggaa gaaagaaaga aagaaagaag ctgcaagtga gcaaaggtct | 2340 |
| ctcttcctga accagactag aagacactca gggagtcgct ggctctaggg ggttcggtgt | 2400 |
| ctgctcacac ttggatggag cccatagaca tagcatatgg ttctgatttt cagtatgtgt | 2460 |
| gtgtgcgcgc gtgcacacac acacacacat acacacagac acagggactt cagcccctgt | 2520 |
| tttaggttga gaggcctaga ctctgctact ccttagcctg gccagagaac cctcactgtc | 2580 |
| ctctgggaac taggcaacat ggaattactg gttccgtgac atccactgaa agtaaagact | 2640 |
| cctgggaaga gaggctaagg tctttgtcta aataaaggaa ccttttaccc gga | 2693 |

<210> 5
<211> 2503
<212> DNA
<213> Mus musculus
<400> 5

| | |
|---|---|
| ggttcctgtt ccccaatagc tcagcctgtt tccgtgacta caatatatag ccattgtcca | 60 |
| agagacacat aaacctcaca cctacacctc tgcccgcccg gagtcagcag ggcccagcca | 120 |
| gaagattgag ggcttggatt caaatcccac atctgacctg acacccatgc tttgcctcat | 180 |
| gcctgtttca acttctgttc cttaaaacaa ggagggggga ctgacccctc taccagctgg | 240 |
| ccactgccgt ccttgaccac accatgggga gcccggtgca actcagcctg ctctgtgttg | 300 |
| tcctggccag cctcctgctc cctgggaaag gtgtgtttat taaccgggaa cgtgccaaca | 360 |
| atgtcctggc gaggactcgg agggcaaact cattttttga agagttcaag aaaggaaatc | 420 |
| tggaaagaga gtgtatggaa gaaatttgtt cttatgaaga ggtccgtgaa atcttcgagg | 480 |
| acgacgagaa gacgaaagaa tactggacca aatataaaga cggcgaccag tgtgaaagca | 540 |
| gcccttgcca gaaccaagga gcgtgtcgag atggcatcgg gggttacacg tgcacctgct | 600 |
| cggagggatt tgaaggcaaa aactgtgagc tctttgttcg gaaactctgc cgcctagaca | 660 |
| acggagactg tgaccagttc tgcagagaag agcagaactc agtggtgtgc tcctgcgcca | 720 |
| gcggttactt cctgggtaat gatggcaagt cttgcatctc cacagctccc ttcccctgtg | 780 |
| gaaaaatcac tacaggacgt aggaagaggt ctgtggccct aaacaccagc gacagtgagc | 840 |
| ttgaccttga agacgccctg cttgatgagg atttcctgtc ccctacggag aatcctattg | 900 |
| aactgctcaa cctcaacgag acacagcctg agaggagcag cgatgacctt gttcggattg | 960 |
| tgggtggccg ggaatgcaag gatggagaat gtccctggca ggctctgctc attaacgaag | 1020 |
| acaatgaagg gttctgtggg ggcaccatct tgaatgagtt ctacatcctc actgctgccc | 1080 |
| actgtctcca tcaggccagg cgattcaagg tgagggtagg tgatcggaac acagagaagg | 1140 |
| aagaaggcaa cgagatggtg cacgaggtgg acgtggtcat taagcacaac aagtttcaga | 1200 |
| gggacaccta cgactatgat atcgccgtgc tgaggctgaa gactcccatc acgttccgga | 1260 |
| tgaacgtggc ccctgcctgc ctgcctcaga aagactgggc cgagtccaca ctgatgacac | 1320 |
| agaagacggg catcgtgagc gggtttggac gcacgcatga gaagggccgc cagtcgaaca | 1380 |
| tcctgaagat gctggaggta ccctacgtgg atcgcaacac ctgcaagctc tccaccagct | 1440 |
| tcagcatcac acagaatatg ttctgtgcgg gctatgaggc caagttagag gatgcctgcc | 1500 |
| agggggacag tggtggcccc catgtcacac ggttcaaaaa tacctactat gtgaccggca | 1560 |
| ttgtcagctg gggagagggg tgtgcaagga aagggaaata tggcatctac acaaaggtca | 1620 |
| cgaccttcct caagtggatt gacaggtcca tgaaagccag ggtgggaccc acagccgaga | 1680 |
| ccccaaggac agcaggtccg cccaattaaa gcagtccttc tccagtcctg ctgggtcaca | 1740 |
| tctggtgttg tttaatgttg ccaccttaaa caggaatgtt cttggggcag ctgccccacc | 1800 |
| tgtggtgggg tcttttccct cagtcttatt tcccttgact tcatggtata cgaaacgggc | 1860 |
| tgcagccggg cagtggtggc acacaccttt aatctcagca ctcaggaggc agagacaggc | 1920 |
| agatttctga atttgaggcc agactggtct acagagtgag ttccaggaca gccagggcta | 1980 |
| cacagagaaa ccctgtctca aaaaatgaat gaacgaacaa acgaacgaac aaacaaatga | 2040 |
| acgaaagaaa gaaagaaaga aagaaagaaa gaaagaaaga aaggaaggaa ggaaggaagg | 2100 |
| aaggaaggaa gaaagaaaga aagaaagaag ctgcaagtga gcaaaggtct ctcttcctga | 2160 |
| accagactag aagacactca gggagtcgct ggctctaggg ggttcggtgt ctgctcacac | 2220 |
| ttggatggag cccatagaca tagcatatgg ttctgatttt cagtatgtgt gtgtgcgcgc | 2280 |
| gtgcacacac acacacacat acacacagac acagggactt cagcccctgt tttaggttga | 2340 |
| gaggcctaga ctctgctact ccttagcctg gccagagaac cctcactgtc ctctgggaac | 2400 |
| taggcaacat ggaattactg gttccgtgac atccactgaa agtaaagact cctgggaaga | 2460 |
| gaggctaagg tctttgtcta aataaaggaa ccttttaccc gga | 2503 |

<210> 6
<211> 1618
<212> DNA
<213> Rattus norvegicus
<400> 6

| | |
|---|---|
| atcagaaggc tgagataagc agactgacca tggccacctg gggcctaggg tgagtgaacc | 60 |
| ttgccccatg cctgtcacag cagctgctgt ccttgaccac atcatggaga gcccggtgcg | 120 |
| actcagcctt ctctatgttg tcctggccag cctcctgctc ccggggagaa gtgtgtttat | 180 |
| taaccgggaa cgagccaaca acgtcctgca gaggattcgg agagcaaact cattttttga | 240 |
| ggagataaag aaaggaaatc tggaaaggga gtgtgtggaa gaaatttgtt cttttgaaga | 300 |
| ggcccgcgaa gtctttgagg acaatgagaa gacgacagaa ttctggaaca aatatgaaga | 360 |
| tggtgaccag tgtgagagca gtccttgcca gaaccaaggc gagtgtcgag atggccttgg | 420 |
| gagttataca tgcacctgca cggagggatt cgaaggcaaa aactgtgaac tctttgttcg | 480 |
| gaaactctgc agcctagaca acggagactg cgaccagttc tgccgtgagg agcagaactc | 540 |
| agtggtgtgc tcctgtgcca agggttactt cctgggtaat gacggcaagt cctgcctctc | 600 |
| cacagctccc ttcccctgtg gaaaaaccaa taaaggacgc gcgaagaggt ctgtggccct | 660 |
| aaataccagc aacagtgaac ctgaccctga agacctcatg cctgatgcag atattctata | 720 |
| tcctactgag agtccttctg aactgctcaa tctcaacaag acagagcctg aagcaaacag | 780 |
| tgatgacgtt attcggattg tgggtggcca agaatgcaag agaggagaat gtccttggca | 840 |
| ggctctgctc tttagcgacg aagagactga tgggttctgt gggggcacca tcttgaatga | 900 |
| gttctacatc ctcactgccg cccattgtct ccatcaagcc aagcgattca aggtgagggt | 960 |
| aggggacctg aacacggaac aggaagacgg cggcgagatg gtgcacgagg tggatatgat | 1020 |
| catcaagcac aacaagtttc agagggacac ctacgacttc gacattgcca tgctgaggct | 1080 |
| gaagaccccc atcacgttcc gcgagaacgt ggcccctgcc tgcttgcctc agaaagactg | 1140 |
| ggccgaggcc acactgatga cgcaaaagac aggcatcgtg agcgggtttg gacgcacgca | 1200 |
| cgagaagggc cgccagtcca aagtcctgaa gatgatggag gtgccctatg tggaccgcaa | 1260 |
| cacctgcagg ctctccacca gcttcagcat tacgcagaat atgttctgcg caggctatga | 1320 |
| cgccaagcaa gaggacgcct gccaggggga cagcggtggc cctcacgtca cacgattcaa | 1380 |
| agacacctac tttgtgaccg gcatcgtcag ctggggagag gggtgtgcaa ggaaagggaa | 1440 |
| atacggcatc tacacgaagg tcacggcctt cctcaaatgg attgacaggt ccatgaaagc | 1500 |
| cagggtgggg cccacctctg agaccccaag gttaacccat ccaccctatt aaagcagtcc | 1560 |
| ttctccagaa aaaaaaaaaa aaaaaaaaaa aaaaaaaaaa aaaaaaaaaa aaaaaaaa | 1618 |

<210> 7
<211> 1654
<212> DNA
<213> Macaca fascicularis
<400> 7

| | |
|---|---|
| ggccgggcgt ggactttgct ccggcagcct gtcccagtga ggacaggcac acggtactcg | 60 |
| gccacaccat ggggcgccca ctgcacctcg tcctgctcag tgccttcttg gccagcctcc | 120 |
| tgctgcccgg ggaaagtctg ttcatccgca gggagcaggc caacaacgtc ctggcgaggg | 180 |
| tcaggaggtc caattccttt cttgaagaga tgaagaaagg aaaccttgaa agagagtgca | 240 |
| tggaagagac ctgctcatac gaagaggccc gcgaggtctt cgaggacagc gacaagacga | 300 |
| atgaattctg gaataaatac aaagatggcg accagtgtga gaccagtcct tgccagaacg | 360 |
| agggcaaatg tagagacggc cttggggaat acacctgcac ctgtttagaa ggattcgaag | 420 |
| gcaaaaactg tgaattgttc acacggaagc tctgcagcct ggacaacgga gagtgtgacc | 480 |
| agttctgcca cgaggagcag aactcggtgg tgtgctcctg cgccaggggg tacaccctgg | 540 |
| ccgacaacgg caaggcctgc attcccacag gaccctaccc ctgtgggaaa cagaccctgg | 600 |
| aacgcaggaa gaggtcagcg gcccaggcca ccaacagcag cggggaagcc cccgacaaca | 660 |
| tcatatggaa gccggatgac gcagccgacc tggacgccac cgagaacccc tttgacctgc | 720 |
| ttgacttcaa ccagacgcag cccgagaggg gcgacaacaa cctcatcagg atcgtgggcg | 780 |
| gccgggaatg cgagaacggg gagtgtccct ggcaggccct gctcatcaac gaggaaaacg | 840 |
| aggggttctg tggtggcacc attctgagcg agttctacat cctcactgca gcccactgtc | 900 |
| tctaccaagc caagagattc aaggtgaggg taggggaccg ggacatggag caggaggagg | 960 |
| gcggcgaggc ggtgcacgag gtggaggtga tcatcaagca caaccggttc acaaaggaga | 1020 |
| cctatgactt cgacatcgcc gtgctccggc tcaagagccc catcaccttc cgcatgaacg | 1080 |
| tggcacccgc ctgcctcccc gagcgcgact gggccgagtc cacgctgatg acgcagaaga | 1140 |
| cggggattgt gagcggcttc gggcgcaccc acgagaaggg ccggcagtcc accaggctca | 1200 |
| agatgctgga ggtgccctac gtggaccgca acagctgcaa gctctccagc agcttcatca | 1260 |
| tcacccagaa catgttctgt gccggctacc acgccaagca ggaggacgcc tgccaggggg | 1320 |
| acagtggggg cccccacgtc acccgcttca aggacaccta cttcgtgaca ggcatcgtca | 1380 |
| gctggggaga gggctgcgcc cggaagggga agtacgggat ctacaccaag gtcaccgcct | 1440 |
| tcctcaagtg gatcgacagg tccatgaaaa ccaggggctt gcccaaggct gagagccgtg | 1500 |
| ccccagaggc cagcacgtcc tctccattaa agtgagatcc cacgcaaggc ctggtccaga | 1560 |
| tgttgagtcc ttaccccgct gcatccggca ctgtccctag gcctcaagtt aaatggccat | 1620 |
| gaaaaccaag tgaaccttca gtaaacagaa gact | 1654 |

<210> 8
<211> 1536
<212> DNA
<213> Homo sapiens
<400> 8

| | |
|---|---|
| ttgagtggga tctcacttta atggagagga cgttatgacc tccggggcat ggctcttggc | 60 |
| cttgggcaag cccctggttt tcatggacct gtcgatccac ttgaggaagg cggtgacctt | 120 |
| ggtgtagatc ccgtacttcc ccttacgggc acagccctct ccccagctga cgatgcctgt | 180 |
| cacgaagtag gtgtccttga agcgggtgac gtgcgggccc ccgctgtccc cctggcaggc | 240 |
| atcctcctgc ttggtgtcgt agccggcaca gaacatgttc tgggtgatga tgaagctgct | 300 |
| ggacagcttg cagctgttgc ggtccacgta gggcacctcc agcatcttga gcctggtgga | 360 |
| ctgccggccc ttctcgtggg tgcgcccgaa gccgctcaca atccccgtct tctgcgtcat | 420 |
| cagcgtggac tcggcccagt cacgctcggg gaggcaggca ggcgccacgt tcatgcggaa | 480 |
| ggtgatgggg gtcttgagcc ggagcacggc gatgtcgaag tcataggtct cctttgtgaa | 540 |
| ccggttgtgc ttgatgacca cctccacctc gtgcaccgcc tcaccgccct cctcctgctc | 600 |
| cgtgttccgg tcccctaccc tcaccttgaa tctcttggct tggtagagac agtgggctgc | 660 |
| cgttaggatg tagaactcgc tcagaatggt tccaccacag aaaccctcgt tttcctcatt | 720 |
| gatgagcagg gcctgccagg gacactcccc gtccttgcat tcctggcctc ccacgatcct | 780 |
| ggtgaggttg ttgtcgcccc tctcaggctg cgtctggttg aagtcaagca ggtcgaaggg | 840 |
| gttctcggtg gggtccaggt cggctgcatc atatggcttc catgtgatgc tgtcaggggc | 900 |
| ctccccgctg ctgctggtgg cctgggccac tgacctcttc ctgcgttcca gggtctgttt | 960 |
| cccacagggg tagggccctg tgggaatgca ggccttgccg ttgtcagcca gggtgtaccc | 1020 |
| gcgggcgcag gagcacacca cagagttctg ttcctcgtgg cagaactggt cacagtcccc | 1080 |
| gttgtccagg ctgcagagct tccgtgtgaa taattcacag tttttgcctt cgaatccttc | 1140 |
| taaacaggtg caggtgtatt ccccgaggcc gtctttacat ttgccctggt tctggcaagg | 1200 |
| actggtctca cactggtcgc catctttgta tttattccag aattcattcg tcttgtcgct | 1260 |
| gtcctcaaag acctcgcggg cctcttcgta tgagcaggtc tcttccatgc actctctttc | 1320 |
| gaggtgtcct ttcttcatct cttcaagaaa ggaattggcc ctcgtgaccc tcgccaggat | 1380 |
| gttgttggcc tgctccctgc ggatgaacag actttccccg agcagcagga ggccagccag | 1440 |
| ggaggcactg agcaggacga ggtgcagtgg gcgccccatg gtgtggccga gtactgtgtc | 1500 |
| cctgtcctca ctgggacagg ctgctggagc aaagtc | 1536 |

<210> 9
<211> 1404
<212> DNA
<213> Homo sapiens
<400> 9

| | |
|---|---|
| ttgagtggga tctcacttta atggagagga cgttatgacc tccggggcat ggctcttggc | 60 |
| cttgggcaag cccctggttt tcatggacct gtcgatccac ttgaggaagg cggtgacctt | 120 |
| ggtgtagatc ccgtacttcc ccttacgggc acagccctct ccccagctga cgatgcctgt | 180 |
| cacgaagtag gtgtccttga agcgggtgac gtgcgggccc ccgctgtccc cctggcaggc | 240 |
| atcctcctgc ttggtgtcgt agccggcaca gaacatgttc tgggtgatga tgaagctgct | 300 |
| ggacagcttg cagctgttgc ggtccacgta gggcacctcc agcatcttga gcctggtgga | 360 |
| ctgccggccc ttctcgtggg tgcgcccgaa gccgctcaca atccccgtct tctgcgtcat | 420 |
| cagcgtggac tcggcccagt cacgctcggg gaggcaggca ggcgccacgt tcatgcggaa | 480 |
| ggtgatgggg gtcttgagcc ggagcacggc gatgtcgaag tcataggtct cctttgtgaa | 540 |
| ccggttgtgc ttgatgacca cctccacctc gtgcaccgcc tcaccgccct cctcctgctc | 600 |
| cgtgttccgg tcccctaccc tcaccttgaa tctcttggct tggtagagac agtgggctgc | 660 |
| cgttaggatg tagaactcgc tcagaatggt tccaccacag aaaccctcgt tttcctcatt | 720 |
| gatgagcagg gcctgccagg gacactcccc gtccttgcat tcctggcctc ccacgatcct | 780 |
| ggtgaggttg ttgtcgcccc tctcaggctg cgtctggttg aagtcaagca ggtcgaaggg | 840 |
| gttctcggtg gggtccaggt cggctgcatc atatggcttc catgtgatgc tgtcaggggc | 900 |
| ctccccgctg ctgctggtgg cctgggccac tgacctcttc ctgcgttcca gggtctgttt | 960 |
| cccacagggg tagggccata attcacagtt tttgccttcg aatccttcta aacaggtgca | 1020 |
| ggtgtattcc ccgaggccgt ctttacattt gccctggttc tggcaaggac tggtctcaca | 1080 |
| ctggtcgcca tctttgtatt tattccagaa ttcattcgtc ttgtcgctgt cctcaaagac | 1140 |
| ctcgcgggcc tcttcgtatg agcaggtctc ttccatgcac tctctttcga ggtgtccttt | 1200 |
| cttcatctct tcaagaaagg aattggccct cgtgaccctc gccaggatgt tgttggcctg | 1260 |
| ctccctgcgg atgaacagac tttccccgag cagcaggagg ccagccaggg aggcactgag | 1320 |
| caggacgagg tgcagtgggc gccccatggt gtggccgagt actgtgtccc tgtcctcact | 1380 |
| gggacaggct gctggagcaa agtc | 1404 |

<210> 10
<211> 1526
<212> DNA
<213> Homo sapiens
<400> 10

| | |
|---|---|
| ttgagtggga tctcacttta atggagagga cgttatgacc tccggggcat ggctcttggc | 60 |
| cttgggcaag cccctggttt tcatggacct gtcgatccac ttgaggaagg cggtgacctt | 120 |
| ggtgtagatc ccgtacttcc ccttacgggc acagccctct ccccagctga cgatgcctgt | 180 |
| cacgaagtag gtgtccttga agcgggtgac gtgcgggccc ccgctgtccc cctggcaggc | 240 |
| atcctcctgc ttggtgtcgt agccggcaca gaacatgttc tgggtgatga tgaagctgct | 300 |
| ggacagcttg cagctgttgc ggtccacgta gggcacctcc agcatcttga gcctggtgga | 360 |
| ctgccggccc ttctcgtggg tgcgcccgaa gccgctcaca atccccgtct tctgcgtcat | 420 |
| cagcgtggac tcggcccagt cacgctcggg gaggcaggca ggcgccacgt tcatgcggaa | 480 |
| ggtgatgggg gtcttgagcc ggagcacggc gatgtcgaag tcataggtct cctttgtgaa | 540 |
| ccggttgtgc ttgatgacca cctccacctc gtgcaccgcc tcaccgccct cctcctgctc | 600 |
| cgtgttccgg tccccttgaa tctcttggct tggtagagac agtgggctgc cgttaggatg | 660 |
| tagaactcgc tcagaatggt tccaccacag aaaccctcgt tttcctcatt gatgagcagg | 720 |
| gcctgccagg gacactcccc gtccttgcat tcctggcctc ccacgatcct ggtgaggttg | 780 |
| ttgtcgcccc tctcaggctg cgtctggttg aagtcaagca ggtcgaaggg gttctcggtg | 840 |
| gggtccaggt cggctgcatc atatggcttc catgtgatgc tgtcaggggc ctccccgctg | 900 |
| ctgctggtgg cctgggccac tgacctcttc ctgcgttcca gggtctgttt cccacagggg | 960 |
| tagggccctg tgggaatgca ggccttgccg ttgtcagcca gggtgtaccc gcgggcgcag | 1020 |
| gagcacacca cagagttctg ttcctcgtgg cagaactggt cacagtcccc gttgtccagg | 1080 |
| ctgcagagct tccgtgtgaa taattcacag tttttgcctt cgaatccttc taaacaggtg | 1140 |
| caggtgtatt ccccgaggcc gtctttacat ttgccctggt tctggcaagg actggtctca | 1200 |
| cactggtcgc catctttgta tttattccag aattcattcg tcttgtcgct gtcctcaaag | 1260 |
| acctcgcggg cctcttcgta tgagcaggtc tcttccatgc actctctttc gaggtgtcct | 1320 |
| ttcttcatct cttcaagaaa ggaattggcc ctcgtgaccc tcgccaggat gttgttggcc | 1380 |
| tgctccctgc ggatgaacag actttccccg agcagcagga ggccagccag ggaggcactg | 1440 |
| agcaggacga ggtgcagtgg gcgccccatg gtgtggccga gtactgtgtc cctgtcctca | 1500 |
| ctgggacagg ctgctggagc aaagtc | 1526 |

<210> 11
<211> 2693
<212> DNA
<213> Mus musculus
<400> 11

| | |
|---|---|
| tccgggtaaa aggttccttt atttagacaa agaccttagc ctctcttccc aggagtcttt | 60 |
| actttcagtg gatgtcacgg aaccagtaat tccatgttgc ctagttccca gaggacagtg | 120 |
| agggttctct ggccaggcta aggagtagca gagtctaggc ctctcaacct aaaacagggg | 180 |
| ctgaagtccc tgtgtctgtg tgtatgtgtg tgtgtgtgtg cacgcgcgca cacacacata | 240 |
| ctgaaaatca gaaccatatg ctatgtctat gggctccatc caagtgtgag cagacaccga | 300 |
| accccctaga gccagcgact ccctgagtgt cttctagtct ggttcaggaa gagagacctt | 360 |
| tgctcacttg cagcttcttt ctttctttct ttcttccttc cttccttcct tccttccttc | 420 |
| ctttctttct ttctttcttt ctttctttct ttctttcttt cgttcatttg tttgttcgtt | 480 |
| cgtttgttcg ttcattcatt ttttgagaca gggtttctct gtgtagccct ggctgtcctg | 540 |
| gaactcactc tgtagaccag tctggcctca aattcagaaa tctgcctgtc tctgcctcct | 600 |
| gagtgctgag attaaaggtg tgtgccacca ctgcccggct gcagcccgtt tcgtatacca | 660 |
| tgaagtcaag ggaaataaga ctgagggaaa agaccccacc acaggtgggg cagctgcccc | 720 |
| aagaacattc ctgtttaagg tggcaacatt aaacaacacc agatgtgacc cagcaggact | 780 |
| ggagaaggac tgctttaatt gggcggacct gctgtccttg gggtctcggc tgtgggtccc | 840 |
| accctggctt tcatggacct gtcaatccac ttgaggaagg tcgtgacctt tgtgtagatg | 900 |
| ccatatttcc ctttccttgc acacccctct ccccagctga caatgccggt cacatagtag | 960 |
| gtatttttga accgtgtgac atgggggcca ccactgtccc cctggcaggc atcctctaac | 1020 |
| ttggcctcat agcccgcaca gaacatattc tgtgtgatgc tgaagctggt ggagagcttg | 1080 |
| caggtgttgc gatccacgta gggtacctcc agcatcttca ggatgttcga ctggcggccc | 1140 |
| ttctcatgcg tgcgtccaaa cccgctcacg atgcccgtct tctgtgtcat cagtgtggac | 1200 |
| tcggcccagt ctttctgagg caggcaggca ggggccacgt tcatccggaa cgtgatggga | 1260 |
| gtcttcagcc tcagcacggc gatatcatag tcgtaggtgt ccctctgaaa cttgttgtgc | 1320 |
| ttaatgacca cgtccacctc gtgcaccatc tcgttgcctt cttccttctc tgtgttccga | 1380 |
| tcacctaccc tcaccttgaa tcgcctggcc tgatggagac agtgggcagc agtgaggatg | 1440 |
| tagaactcat tcaagatggt gcccccacag aacccttcat tgtcttcgtt aatgagcaga | 1500 |
| gcctgccagg gacattctcc atccttgcat tcccggccac ccacaatccg aacaaggtca | 1560 |
| tcgctgctcc tctcaggctg tgtctcgttg aggttgagca gttcaatagg attctccgta | 1620 |
| ggggacagga aatcctcatc aagcagggcg tcttcaaggt caagctcact gtcgctggtg | 1680 |
| tttagggcca cagacctctt cctacgtcct gtagtgattt ttccacaggg gaagggagct | 1740 |
| gtggagatgc aagacttgcc atcattaccc aggaagtaac cgctggcgca ggagcacacc | 1800 |
| actgagttct gctcttctct gcagaactgg tcacagtctc cgttgtctag gcggcagagt | 1860 |
| ttccgaacaa agagctcaca gtttttgcct tcaaatccct ccgagcaggt gcacgtgtaa | 1920 |
| cccccgatgc catctcgaca cgctccttgg ttctggcaag ggctgctttc acactggtcg | 1980 |
| ccgtctttat atttggtcca gtattctttc gtcttctcgt cgtcctcgaa gatttcacgg | 2040 |
| acctcttcat aagaacaaat ttcttccata cactctcttt ccagatttcc tttcttgaac | 2100 |
| tcttcaaaaa atgagtttgc cctccgagtc ctcgccagga cattgttggc acgttcccgg | 2160 |
| ttaataaaca cacctttccc agggagcagg aggctggcca ggacaacaca gagcaggctg | 2220 |
| agttgcaccg ggctccccat ggtgtggtca aggacggcag tggctgtgac aggcatgggg | 2280 |
| caaggttcac tcaccctggg ccccaggtgg ccatgggcct tctgcttatc tcagccttct | 2340 |
| gattggagcc ctgggccagc aatgaggtca ggggactggg gactgtggtg accagcccca | 2400 |
| gcctttctag gggaggctac ccttatccag aactgccagg cagggcctgc ttcccagctg | 2460 |
| gtagaggggt cagtcccccc tccttgtttt aaggaacaga agttgaaaca ggcatgaggc | 2520 |
| aaagcatggg tgtcaggtca gatgtgggat ttgaatccaa gccctcaatc ttctggctgg | 2580 |
| gccctgctga ctccgggcgg gcagaggtgt aggtgtgagg tttatgtgtc tcttggacaa | 2640 |
| tggctatata ttgtagtcac ggaaacaggc tgagctattg gggaacagga acc | 2693 |

<210> 12
<211> 2503
<212> DNA
<213> Mus musculus
<400> 12

| | |
|---|---|
| tccgggtaaa aggttccttt atttagacaa agaccttagc ctctcttccc aggagtcttt | 60 |
| actttcagtg gatgtcacgg aaccagtaat tccatgttgc ctagttccca gaggacagtg | 120 |
| agggttctct ggccaggcta aggagtagca gagtctaggc ctctcaacct aaaacagggg | 180 |
| ctgaagtccc tgtgtctgtg tgtatgtgtg tgtgtgtgtg cacgcgcgca cacacacata | 240 |
| ctgaaaatca gaaccatatg ctatgtctat gggctccatc caagtgtgag cagacaccga | 300 |
| accccctaga gccagcgact ccctgagtgt cttctagtct ggttcaggaa gagagacctt | 360 |
| tgctcacttg cagcttcttt ctttctttct ttcttccttc cttccttcct tccttccttc | 420 |
| ctttctttct ttctttcttt ctttctttct ttctttcttt cgttcatttg tttgttcgtt | 480 |
| cgtttgttcg ttcattcatt ttttgagaca gggtttctct gtgtagccct ggctgtcctg | 540 |
| gaactcactc tgtagaccag tctggcctca aattcagaaa tctgcctgtc tctgcctcct | 600 |
| gagtgctgag attaaaggtg tgtgccacca ctgcccggct gcagcccgtt tcgtatacca | 660 |
| tgaagtcaag ggaaataaga ctgagggaaa agaccccacc acaggtgggg cagctgcccc | 720 |
| aagaacattc ctgtttaagg tggcaacatt aaacaacacc agatgtgacc cagcaggact | 780 |
| ggagaaggac tgctttaatt gggcggacct gctgtccttg gggtctcggc tgtgggtccc | 840 |
| accctggctt tcatggacct gtcaatccac ttgaggaagg tcgtgacctt tgtgtagatg | 900 |
| ccatatttcc ctttccttgc acacccctct ccccagctga caatgccggt cacatagtag | 960 |
| gtatttttga accgtgtgac atgggggcca ccactgtccc cctggcaggc atcctctaac | 1020 |
| ttggcctcat agcccgcaca gaacatattc tgtgtgatgc tgaagctggt ggagagcttg | 1080 |
| caggtgttgc gatccacgta gggtacctcc agcatcttca ggatgttcga ctggcggccc | 1140 |
| ttctcatgcg tgcgtccaaa cccgctcacg atgcccgtct tctgtgtcat cagtgtggac | 1200 |
| tcggcccagt ctttctgagg caggcaggca ggggccacgt tcatccggaa cgtgatggga | 1260 |
| gtcttcagcc tcagcacggc gatatcatag tcgtaggtgt ccctctgaaa cttgttgtgc | 1320 |
| ttaatgacca cgtccacctc gtgcaccatc tcgttgcctt cttccttctc tgtgttccga | 1380 |
| tcacctaccc tcaccttgaa tcgcctggcc tgatggagac agtgggcagc agtgaggatg | 1440 |
| tagaactcat tcaagatggt gcccccacag aacccttcat tgtcttcgtt aatgagcaga | 1500 |
| gcctgccagg gacattctcc atccttgcat tcccggccac ccacaatccg aacaaggtca | 1560 |
| tcgctgctcc tctcaggctg tgtctcgttg aggttgagca gttcaatagg attctccgta | 1620 |
| ggggacagga aatcctcatc aagcagggcg tcttcaaggt caagctcact gtcgctggtg | 1680 |
| tttagggcca cagacctctt cctacgtcct gtagtgattt ttccacaggg gaagggagct | 1740 |
| gtggagatgc aagacttgcc atcattaccc aggaagtaac cgctggcgca ggagcacacc | 1800 |
| actgagttct gctcttctct gcagaactgg tcacagtctc cgttgtctag gcggcagagt | 1860 |
| ttccgaacaa agagctcaca gtttttgcct tcaaatccct ccgagcaggt gcacgtgtaa | 1920 |
| cccccgatgc catctcgaca cgctccttgg ttctggcaag ggctgctttc acactggtcg | 1980 |
| ccgtctttat atttggtcca gtattctttc gtcttctcgt cgtcctcgaa gatttcacgg | 2040 |
| acctcttcat aagaacaaat ttcttccata cactctcttt ccagatttcc tttcttgaac | 2100 |
| tcttcaaaaa atgagtttgc cctccgagtc ctcgccagga cattgttggc acgttcccgg | 2160 |
| ttaataaaca cacctttccc agggagcagg aggctggcca ggacaacaca gagcaggctg | 2220 |
| agttgcaccg ggctccccat ggtgtggtca aggacggcag tggccagctg gtagaggggt | 2280 |
| cagtcccccc tccttgtttt aaggaacaga agttgaaaca ggcatgaggc aaagcatggg | 2340 |
| tgtcaggtca gatgtgggat ttgaatccaa gccctcaatc ttctggctgg gccctgctga | 2400 |
| ctccgggcgg gcagaggtgt aggtgtgagg tttatgtgtc tcttggacaa tggctatata | 2460 |
| ttgtagtcac ggaaacaggc tgagctattg gggaacagga acc | 2503 |

<210> 13
<211> 1618
<212> DNA
<213> Rattus norvegicus
<400> 13

| | |
|---|---|
| tttttttttt tttttttttt tttttttttt tttttttttt tttttttttt ctggagaagg | 60 |
| actgctttaa tagggtggat gggttaacct tggggtctca gaggtgggcc ccaccctggc | 120 |
| tttcatggac ctgtcaatcc atttgaggaa ggccgtgacc ttcgtgtaga tgccgtattt | 180 |
| ccctttcctt gcacacccct ctccccagct gacgatgccg gtcacaaagt aggtgtcttt | 240 |
| gaatcgtgtg acgtgagggc caccgctgtc cccctggcag gcgtcctctt gcttggcgtc | 300 |
| atagcctgcg cagaacatat tctgcgtaat gctgaagctg gtggagagcc tgcaggtgtt | 360 |
| gcggtccaca tagggcacct ccatcatctt caggactttg gactggcggc ccttctcgtg | 420 |
| cgtgcgtcca aacccgctca cgatgcctgt cttttgcgtc atcagtgtgg cctcggccca | 480 |
| gtctttctga ggcaagcagg caggggccac gttctcgcgg aacgtgatgg gggtcttcag | 540 |
| cctcagcatg gcaatgtcga agtcgtaggt gtccctctga aacttgttgt gcttgatgat | 600 |
| catatccacc tcgtgcacca tctcgccgcc gtcttcctgt tccgtgttca ggtcccctac | 660 |
| cctcaccttg aatcgcttgg cttgatggag acaatgggcg gcagtgagga tgtagaactc | 720 |
| attcaagatg gtgcccccac agaacccatc agtctcttcg tcgctaaaga gcagagcctg | 780 |
| ccaaggacat tctcctctct tgcattcttg gccacccaca atccgaataa cgtcatcact | 840 |
| gtttgcttca ggctctgtct tgttgagatt gagcagttca gaaggactct cagtaggata | 900 |
| tagaatatct gcatcaggca tgaggtcttc agggtcaggt tcactgttgc tggtatttag | 960 |
| ggccacagac ctcttcgcgc gtcctttatt ggtttttcca caggggaagg gagctgtgga | 1020 |
| gaggcaggac ttgccgtcat tacccaggaa gtaacccttg gcacaggagc acaccactga | 1080 |
| gttctgctcc tcacggcaga actggtcgca gtctccgttg tctaggctgc agagtttccg | 1140 |
| aacaaagagt tcacagtttt tgccttcgaa tccctccgtg caggtgcatg tataactccc | 1200 |
| aaggccatct cgacactcgc cttggttctg gcaaggactg ctctcacact ggtcaccatc | 1260 |
| ttcatatttg ttccagaatt ctgtcgtctt ctcattgtcc tcaaagactt cgcgggcctc | 1320 |
| ttcaaaagaa caaatttctt ccacacactc cctttccaga tttcctttct ttatctcctc | 1380 |
| aaaaaatgag tttgctctcc gaatcctctg caggacgttg ttggctcgtt cccggttaat | 1440 |
| aaacacactt ctccccggga gcaggaggct ggccaggaca acatagagaa ggctgagtcg | 1500 |
| caccgggctc tccatgatgt ggtcaaggac agcagctgct gtgacaggca tggggcaagg | 1560 |
| ttcactcacc ctaggcccca ggtggccatg gtcagtctgc ttatctcagc cttctgat | 1618 |

<210> 14
<211> 1654
<212> DNA
<213> Macaca fascicularis
<400> 14

| | |
|---|---|
| agtcttctgt ttactgaagg ttcacttggt tttcatggcc atttaacttg aggcctaggg | 60 |
| acagtgccgg atgcagcggg gtaaggactc aacatctgga ccaggccttg cgtgggatct | 120 |
| cactttaatg gagaggacgt gctggcctct ggggcacggc tctcagcctt gggcaagccc | 180 |
| ctggttttca tggacctgtc gatccacttg aggaaggcgg tgaccttggt gtagatcccg | 240 |
| tacttcccct tccgggcgca gccctctccc cagctgacga tgcctgtcac gaagtaggtg | 300 |
| tccttgaagc gggtgacgtg ggggccccca ctgtccccct ggcaggcgtc ctcctgcttg | 360 |
| gcgtggtagc cggcacagaa catgttctgg gtgatgatga agctgctgga gagcttgcag | 420 |
| ctgttgcggt ccacgtaggg cacctccagc atcttgagcc tggtggactg ccggcccttc | 480 |
| tcgtgggtgc gcccgaagcc gctcacaatc cccgtcttct gcgtcatcag cgtggactcg | 540 |
| gcccagtcgc gctcggggag gcaggcgggt gccacgttca tgcggaaggt gatggggctc | 600 |
| ttgagccgga gcacggcgat gtcgaagtca taggtctcct ttgtgaaccg gttgtgcttg | 660 |
| atgatcacct ccacctcgtg caccgcctcg ccgccctcct cctgctccat gtcccggtcc | 720 |
| cctaccctca ccttgaatct cttggcttgg tagagacagt gggctgcagt gaggatgtag | 780 |
| aactcgctca gaatggtgcc accacagaac ccctcgtttt cctcgttgat gagcagggcc | 840 |
| tgccagggac actccccgtt ctcgcattcc cggccgccca cgatcctgat gaggttgttg | 900 |
| tcgcccctct cgggctgcgt ctggttgaag tcaagcaggt caaaggggtt ctcggtggcg | 960 |
| tccaggtcgg ctgcgtcatc cggcttccat atgatgttgt cgggggcttc cccgctgctg | 1020 |
| ttggtggcct gggccgctga cctcttcctg cgttccaggg tctgtttccc acaggggtag | 1080 |
| ggtcctgtgg gaatgcaggc cttgccgttg tcggccaggg tgtaccccct ggcgcaggag | 1140 |
| cacaccaccg agttctgctc ctcgtggcag aactggtcac actctccgtt gtccaggctg | 1200 |
| cagagcttcc gtgtgaacaa ttcacagttt ttgccttcga atccttctaa acaggtgcag | 1260 |
| gtgtattccc caaggccgtc tctacatttg ccctcgttct ggcaaggact ggtctcacac | 1320 |
| tggtcgccat ctttgtattt attccagaat tcattcgtct tgtcgctgtc ctcgaagacc | 1380 |
| tcgcgggcct cttcgtatga gcaggtctct tccatgcact ctctttcaag gtttcctttc | 1440 |
| ttcatctctt caagaaagga attggacctc ctgaccctcg ccaggacgtt gttggcctgc | 1500 |
| tccctgcgga tgaacagact ttccccgggc agcaggaggc tggccaagaa ggcactgagc | 1560 |
| aggacgaggt gcagtgggcg ccccatggtg tggccgagta ccgtgtgcct gtcctcactg | 1620 |
| ggacaggctg ccggagcaaa gtccacgccc ggcc | 1654 |

### EQUIVALENTS

[0718] Those skilled in the art will recognize, or be able to ascertain using no more than routine experimentation, many equivalents to the specific embodiments and methods described herein. Such equivalents are intended to be encompassed by the scope of the following claims.

1. A double stranded ribonucleic acid (dsRNA) agent for inhibiting expression of coagulation Factor X (F10) in a cell,
a) wherein the dsRNA agent comprises a sense strand and an antisense strand forming a double stranded region,
wherein the sense strand comprises at least 15 contiguous nucleotides differing by no more than 3 nucleotides from the nucleotide sequence of SEQ ID NO:1 and the antisense strand comprises at least 15 contiguous nucleotides differing by no more than 3 nucleotides from the nucleotide sequence of SEQ ID NO:8; or
b) wherein the dsRNA agent comprises a sense strand and an antisense strand forming a double stranded region, wherein the antisense strand comprises a region of complementarity to an mRNA encoding F10, and wherein the region of complementarity comprises at least 15 contiguous nucleotides differing by no more than 3 nucleotides from any one of the antisense nucleotide sequences in any one of Tables 2-3.

2.-6. (canceled)

7. The dsRNA agent of claim 1, wherein at least one nucleotide of the dsRNA agent comprises a nucleotide modification.

8. (canceled)

9. The dsRNA agent of claim 1, wherein all of the nucleotides of the sense strand comprise a nucleotide modification; all of the nucleotides of the antisense strand comprise a nucleotide modification; or all of the nucleotides of the sense strand and all of the nucleotides of the antisense strand comprise a nucleotide modification.

10. The dsRNA agent of claim 7, wherein at least one of the nucleotide modifications is selected from the group consisting of a deoxy-nucleotide modification, a 3′-terminal deoxythimidine (dT) nucleotide modification, a 2′-O-methyl nucleotide modification, a 2′-fluoro nucleotide modification, a 2′-deoxy-nucleotide modification, a locked nucleotide modification, an unlocked nucleotide modification, a conformationally restricted nucleotide modification, a constrained ethyl nucleotide modification, an abasic nucleotide modification, a 2′-amino-nucleotide modification, a 2′-O-allyl-nucleotide modification, 2′-C-alkyl-modified nucleotide modification, 2′-hydroxyl-nucleotide modification, a 2′-methoxyethyl modified nucleotide modification, a 2′-O-alkyl-nucleotide modification, a morpholino nucleotide modification, a phosphoramidate modification, a non-natural base comprising nucleotide modification, a tetrahydropyran nucleotide modification, a 1,5-anhydrohexitol nucleotide modification, a cyclohexenyl nucleotide modification, a nucleotide comprising a phosphorothioate group modification, a nucleotide comprising a methylphosphonate group modification, a nucleotide comprising a 5′-phosphate modification, a nucleotide comprising a 5′-phosphate mimic modification, a thermally destabilizing nucleotide modification, a glycol modified nucleotide (GNA) modification, and a 2-O-(N-methylacetamide) modified nucleotide modification; and combinations thereof.

11.-14. (canceled)

15. The dsRNA agent of claim 1, wherein the double stranded region is 19-30 nucleotide pairs in length.

16.-19. (canceled)

20. The dsRNA agent of claim 1, wherein each strand is independently no more than 30 nucleotides in length.

21.-24. (canceled)

25. The dsRNA agent of claim 1, wherein at least one strand comprises a 3′ overhang of at least 1 nucleotide.

26. (canceled)

27. The dsRNA agent of claim 1, further comprising a ligand.

28. The dsRNA agent of claim 27, wherein the ligand is conjugated to the 3′ end of the sense strand of the dsRNA agent.

29. The dsRNA agent of claim 27, wherein the ligand is an N-acetylgalactosamine (GalNAc) derivative.

30. The dsRNA agent of claim 27, wherein the ligand is one or more GalNAc derivatives attached through a monovalent, bivalent, or trivalent branched linker.

31. The dsRNA agent of claim 29, wherein the ligand is

[chemical structure]

32. The dsRNA agent of claim 31, wherein the dsRNA agent is conjugated to the ligand as shown in the following schematic [chemical structure]
and, wherein X is O or S.

33. The dsRNA agent of claim 32, wherein X is O.

34. The dsRNA agent of claim 1, wherein the dsRNA agent further comprises at least one phosphorothioate or methylphosphonate internucleotide linkage.

35.-43. (canceled)

44. A cell containing the dsRNA agent of claim 1.

45. A pharmaceutical composition for inhibiting expression of a gene encoding coagulation Factor X (F10) comprising the dsRNA agent of claim 1.

46.-50. (canceled)

51. An in vitro method of inhibiting expression of a coagulation Factor X (F10) gene in a cell, the method comprising contacting the cell with the dsRNA agent of claim 1, thereby inhibiting expression of the F10 gene in the cell.

52.-58. (canceled)

59. A method of treating a subject having a disorder that would benefit from reduction in coagulation Factor X (F10) expression, the method comprising administering to the subject a therapeutically effective amount of the dsRNA agent of claim 1, thereby treating the subject having the disorder that would benefit from reduction in F10 expression.

60. (canceled)

61. The method of claim 59, wherein the disorder is an F10-associated disorder.

62. The method of claim 61, wherein the F10-associated disorder is a disorder associated with thrombosis.

63.-70. (canceled)

The application's sequence listing, which the Patent Office published only in electronic form, follows.

SEQUENCE LISTING (470 sequences)

SEQ ID NO: 1 - DNA, 1536 bp, Homo sapiens
  source 1..1536: mol_type = genomic DNA
gactttgctccagcagcctgtcccagtgaggacagggacacagtactcggccacaccatggggcgcccactgcacctcgtcctgctcagtgcctccctggctggcctcctgctgctcggggaaagtctgttcatccgcagggagcaggccaacaacatcctggcgagggtcacgagggccaattcctttcttgaagagatgaagaaaggacacctcgaaagagagtgcatggaagagacctgctcatacgaagaggcccgcgaggtctttgaggacagcgacaagacgaatgaattctggaataaatacaaagatggcgaccagtgtgagaccagtccttgccagaaccagggcaaatgtaaagacggcctcggggaatacacctgcacctgtttagaaggattcgaaggcaaaaactgtgaattattcacacggaagctctgcagcctggacaacggggactgtgaccagttctgccacgaggaacagaactctgtggtgtgctcctgcgcccgcgggtacaccctggctgacaacggcaaggcctgcattcccacagggccctacccctgtgggaaacagaccctggaacgcaggaagaggtcagtggcccaggccaccagcagcagcggggaggcccctgacagcatcacatggaagccatatgatgcagccgacctggaccccaccgagaaccccttcgacctgcttgacttcaaccagacgcagcctgagaggggcgacaacaacctcaccaggatcgtgggaggccaggaatgcaaggacggggagtgtccctggcaggccctgctcatcaatgaggaaaacgagggtttctgtggtggaaccattctgagcgagttctacatcctaacggcagcccactgtctctaccaagccaagagattcaaggtgagggtaggggaccggaacacggagcaggaggagggcggtgaggcggtgcacgaggtggaggtggtcatcaagcacaaccggttcacaaaggagacctatgacttcgacatcgccgtgctccggctcaagacccccatcaccttccgcatgaacgtggcgcctgcctgcctccccgagcgtgactgggccgagtccacgctgatgacgcagaagacggggattgtgagcggcttcgggcgcacccacgagaagggccggcagtccaccaggctcaagatgctggaggtgccctacgtggaccgcaacagctgcaagctgtccagcagcttcatcatcacccagaacatgttctgtgccggctacgacaccaagcaggaggatgcctgccagggggacagcgggggcccgcacgtcacccgcttcaaggacacctacttcgtgacaggcatcgtcagctggggagagggctgtgcccgtaaggggaagtacgggatctacaccaaggtcaccgccttcctcaagtggatcgacaggtccatgaaaaccaggggcttgcccaaggccaagagccatgccccggaggtcataacgtcctctccattaaagtgagatcccactcaa

SEQ ID NO: 2 - DNA, 1404 bp, Homo sapiens
  source 1..1404: mol_type = genomic DNA
gactttgctccagcagcctgtcccagtgaggacagggacacagtactcggccacaccatggggcgcccactgcacctcgtcctgctcagtgcctccctggctggcctcctgctgctcggggaaagtctgttcatccgcagggagcaggccaacaacatcctggcgagggtcacgagggccaattcctttcttgaagagatgaagaaaggacacctcgaaagagagtgcatggaagagacctgctcatacgaagaggcccgcgaggtctttgaggacagcgacaagacgaatgaattctggaataaatacaaagatggcgaccagtgtgagaccagtccttgccagaaccagggcaaatgtaaagacggcctcggggaatacacctgcacctgtttagaaggattcgaaggcaaaaactgtgaattatggccctacccctgtgggaaacagaccctggaacgcaggaagaggtcagtggcccaggccaccagcagcagcggggaggcccctgacagcatcacatggaagccatatgatgcagccgacctggaccccaccgagaaccccttcgacctgcttgacttcaaccagacgcagcctgagaggggcgacaacaacctcaccaggatcgtgggaggccaggaatgcaaggacggggagtgtccctggcaggccctgctcatcaatgaggaaaacgagggtttctgtggtggaaccattctgagcgagttctacatcctaacggcagcccactgtctctaccaagccaagagattcaaggtgagggtaggggaccggaacacggagcaggaggagggcggtgaggcggtgcacgaggtggaggtggtcatcaagcacaaccggttcacaaaggagacctatgacttcgacatcgccgtgctccggctcaagacccccatcaccttccgcatgaacgtggcgcctgcctgcctccccgagcgtgactgggccgagtccacgctgatgacgcagaagacggggattgtgagcggcttcgggcgcacccacgagaagggccggcagtccaccaggctcaagatgctggaggtgccctacgtggaccgcaacagctgcaagctgtccagcagcttcatcatcacccagaacatgttctgtgccggctacgacaccaagcaggaggatgcctgccagggggacagcgggggcccgcacgtcacccgcttcaaggacacctacttcgtgacaggcatcgtcagctggggagagggctgtgcccgtaaggggaagtacgggatctacaccaaggtcaccgccttcctcaagtggatcgacaggtccatgaaaaccaggggcttgcccaaggccaagagccatgccccggaggtcataacgtcctctccattaaagtgagatcccactcaa

SEQ ID NO: 3 - DNA, 1526 bp, Homo sapiens
  source 1..1526: mol_type = genomic DNA
gactttgctccagcagcctgtcccagtgaggacagggacacagtactcggccacaccatggggcgcccactgcacctcgtcctgctcagtgcctccctggctggcctcctgctgctcggggaaagtctgttcatccgcagggagcaggccaacaacatcctggcgagggtcacgagggccaattcctttcttgaagagatgaagaaaggacacctcgaaagagagtgcatggaagagacctgctcatacgaagaggcccgcgaggtctttgaggacagcgacaagacgaatgaattctggaataaatacaaagatggcgaccagtgtgagaccagtccttgccagaaccagggcaaatgtaaagacggcctcggggaatacacctgcacctgtttagaaggattcgaaggcaaaaactgtgaattattcacacggaagctctgcagcctggacaacggggactgtgaccagttctgccacgaggaacagaactctgtggtgtgctcctgcgcccgcgggtacaccctggctgacaacggcaaggcctgcattcccacagggccctacccctgtgggaaacagaccctggaacgcaggaagaggtcagtggcccaggccaccagcagcagcggggaggcccctgacagcatcacatggaagccatatgatgcagccgacctggaccccaccgagaaccccttcgacctgcttgacttcaaccagacgcagcctgagaggggcgacaacaacctcaccaggatcgtgggaggccaggaatgcaaggacggggagtgtccctggcaggccctgctcatcaatgaggaaaacgagggtttctgtggtggaaccattctgagcgagttctacatcctaacggcagcccactgtctctaccaagccaagagattcaaggggaccggaacacggagcaggaggagggcggtgaggcggtgcacgaggtggaggtggtcatcaagcacaaccggttcacaaaggagacctatgacttcgacatcgccgtgctccggctcaagacccccatcaccttccgcatgaacgtggcgcctgcctgcctccccgagcgtgactgggccgagtccacgctgatgacgcagaagacggggattgtgagcggcttcgggcgcacccacgagaagggccggcagtccaccaggctcaagatgctggaggtgccctacgtggaccgcaacagctgcaagctgtccagcagcttcatcatcacccagaacatgttctgtgccggctacgacaccaagcaggaggatgcctgccagggggacagcgggggcccgcacgtcacccgcttcaaggacacctacttcgtgacaggcatcgtcagctggggagagggctgtgcccgtaaggggaagtacgggatctacaccaaggtcaccgccttcctcaagtggatcgacaggtccatgaaaaccaggggcttgcccaaggccaagagccatgccccggaggtcataacgtcctctccattaaagtgagatcccactcaa

SEQ ID NO: 4 - DNA, 2693 bp, Mus musculus
  source 1..2693: mol_type = genomic DNA
ggttcctgttccccaatagctcagcctgtttccgtgactacaatatatagccattgtccaagagacacataaacctcacacctacacctctgcccgcccggagtcagcagggcccagccagaagattgagggcttggattcaaatcccacatctgacctgacacccatgctttgcctcatgcctgtttcaacttctgttccttaaaacaaggaggggggactgacccctctaccagctgggaagcaggccctgcctggcagttctggataagggtagcctcccctagaaaggctggggctggtcaccacagtccccagtcccctgacctcattgctggcccagggctccaatcagaaggctgagataagcagaaggcccatggccacctggggcccagggtgagtgaaccttgccccatgcctgtcacagccactgccgtccttgaccacaccatggggagcccggtgcaactcagcctgctctgtgttgtcctggccagcctcctgctccctgggaaaggtgtgtttattaaccgggaacgtgccaacaatgtcctggcgaggactcggagggcaaactcattttttgaagagttcaagaaaggaaatctggaaagagagtgtatggaagaaatttgttcttatgaagaggtccgtgaaatcttcgaggacgacgagaagacgaaagaatactggaccaaatataaagacggcgaccagtgtgaaagcagcccttgccagaaccaaggagcgtgtcgagatggcatcgggggttacacgtgcacctgctcggagggatttgaaggcaaaaactgtgagctctttgttcggaaactctgccgcctagacaacggagactgtgaccagttctgcagagaagagcagaactcagtggtgtgctcctgcgccagcggttacttcctgggtaatgatggcaagtcttgcatctccacagctcccttcccctgtggaaaaatcactacaggacgtaggaagaggtctgtggccctaaacaccagcgacagtgagcttgaccttgaagacgccctgcttgatgaggatttcctgtcccctacggagaatcctattgaactgctcaacctcaacgagacacagcctgagaggagcagcgatgaccttgttcggattgtgggtggccgggaatgcaaggatggagaatgtccctggcaggctctgctcattaacgaagacaatgaagggttctgtgggggcaccatcttgaatgagttctacatcctcactgctgcccactgtctccatcaggccaggcgattcaaggtgagggtaggtgatcggaacacagagaaggaagaaggcaacgagatggtgcacgaggtggacgtggtcattaagcacaacaagtttcagagggacacctacgactatgatatcgccgtgctgaggctgaagactcccatcacgttccggatgaacgtggcccctgcctgcctgcctcagaaagactgggccgagtccacactgatgacacagaagacgggcatcgtgagcgggtttggacgcacgcatgagaagggccgccagtcgaacatcctgaagatgctggaggtaccctacgtggatcgcaacacctgcaagctctccaccagcttcagcatcacacagaatatgttctgtgcgggctatgaggccaagttagaggatgcctgccagggggacagtggtggcccccatgtcacacggttcaaaaatacctactatgtgaccggcattgtcagctggggagaggggtgtgcaaggaaagggaaatatggcatctacacaaaggtcacgaccttcctcaagtggattgacaggtccatgaaagccagggtgggacccacagccgagaccccaaggacagcaggtccgcccaattaaagcagtccttctccagtcctgctgggtcacatctggtgttgtttaatgttgccaccttaaacaggaatgttcttggggcagctgccccacctgtggtggggtcttttccctcagtcttatttcccttgacttcatggtatacgaaacgggctgcagccgggcagtggtggcacacacctttaatctcagcactcaggaggcagagacaggcagatttctgaatttgaggccagactggtctacagagtgagttccaggacagccagggctacacagagaaaccctgtctcaaaaaatgaatgaacgaacaaacgaacgaacaaacaaatgaacgaaagaaagaaagaaagaaagaaagaaagaaagaaagaaaggaaggaaggaaggaaggaaggaaggaagaaagaaagaaagaaagaagctgcaagtgagcaaaggtctctcttcctgaaccagactagaagacactcagggagtcgctggctctagggggttcggtgtctgctcacacttggatggagcccatagacatagcatatggttctgattttcagtatgtgtgtgtgcgcgcgtgcacacacacacacacatacacacagacacagggacttcagcccctgttttaggttgagaggcctagactctgctactccttagcctggccagagaaccctcactgtcctctgggaactaggcaacatggaattactggttccgtgacatccactgaaagtaaagactcctgggaagagaggctaaggtctttgtctaaataaaggaaccttttacccgga

SEQ ID NO: 5 - DNA, 2503 bp, Mus musculus
  source 1..2503: mol_type = genomic DNA
ggttcctgttccccaatagctcagcctgtttccgtgactacaatatatagccattgtccaagagacacataaacctcacacctacacctctgcccgcccggagtcagcagggcccagccagaagattgagggcttggattcaaatcccacatctgacctgacacccatgctttgcctcatgcctgtttcaacttctgttccttaaaacaaggaggggggactgacccctctaccagctggccactgccgtccttgaccacaccatggggagcccggtgcaactcagcctgctctgtgttgtcctggccagcctcctgctccctgggaaaggtgtgtttattaaccgggaacgtgccaacaatgtcctggcgaggactcggagggcaaactcattttttgaagagttcaagaaaggaaatctggaaagagagtgtatggaagaaatttgttcttatgaagaggtccgtgaaatcttcgaggacgacgagaagacgaaagaatactggaccaaatataaagacggcgaccagtgtgaaagcagcccttgccagaaccaaggagcgtgtcgagatggcatcgggggttacacgtgcacctgctcggagggatttgaaggcaaaaactgtgagctctttgttcggaaactctgccgcctagacaacggagactgtgaccagttctgcagagaagagcagaactcagtggtgtgctcctgcgccagcggttacttcctgggtaatgatggcaagtcttgcatctccacagctcccttcccctgtggaaaaatcactacaggacgtaggaagaggtctgtggccctaaacaccagcgacagtgagcttgaccttgaagacgccctgcttgatgaggatttcctgtcccctacggagaatcctattgaactgctcaacctcaacgagacacagcctgagaggagcagcgatgaccttgttcggattgtgggtggccgggaatgcaaggatggagaatgtccctggcaggctctgctcattaacgaagacaatgaagggttctgtgggggcaccatcttgaatgagttctacatcctcactgctgcccactgtctccatcaggccaggcgattcaaggtgagggtaggtgatcggaacacagagaaggaagaaggcaacgagatggtgcacgaggtggacgtggtcattaagcacaacaagtttcagagggacacctacgactatgatatcgccgtgctgaggctgaagactcccatcacgttccggatgaacgtggcccctgcctgcctgcctcagaaagactgggccgagtccacactgatgacacagaagacgggcatcgtgagcgggtttggacgcacgcatgagaagggccgccagtcgaacatcctgaagatgctggaggtaccctacgtggatcgcaacacctgcaagctctccaccagcttcagcatcacacagaatatgttctgtgcgggctatgaggccaagttagaggatgcctgccagggggacagtggtggcccccatgtcacacggttcaaaaatacctactatgtgaccggcattgtcagctggggagaggggtgtgcaaggaaagggaaatatggcatctacacaaaggtcacgaccttcctcaagtggattgacaggtccatgaaagccagggtgggacccacagccgagaccccaaggacagcaggtccgcccaattaaagcagtccttctccagtcctgctgggtcacatctggtgttgtttaatgttgccaccttaaacaggaatgttcttggggcagctgccccacctgtggtggggtcttttccctcagtcttatttcccttgacttcatggtatacgaaacgggctgcagccgggcagtggtggcacacacctttaatctcagcactcaggaggcagagacaggcagatttctgaatttgaggccagactggtctacagagtgagttccaggacagccagggctacacagagaaaccctgtctcaaaaaatgaatgaacgaacaaacgaacgaacaaacaaatgaacgaaagaaagaaagaaagaaagaaagaaagaaagaaagaaaggaaggaaggaaggaaggaaggaaggaagaaagaaagaaagaaagaagctgcaagtgagcaaaggtctctcttcctgaaccagactagaagacactcagggagtcgctggctctagggggttcggtgtctgctcacacttggatggagcccatagacatagcatatggttctgattttcagtatgtgtgtgtgcgcgcgtgcacacacacacacacatacacacagacacagggacttcagcccctgttttaggttgagaggcctagactctgctactccttagcctggccagagaaccctcactgtcctctgggaactaggcaacatggaattactggttccgtgacatccactgaaagtaaagactcctgggaagagaggctaaggtctttgtctaaataaaggaaccttttacccgga

SEQ ID NO: 6 - DNA, 1618 bp, Rattus norvegicus
  source 1..1618: mol_type = genomic DNA
atcagaaggctgagataagcagactgaccatggccacctggggcctagggtgagtgaaccttgccccatgcctgtcacagcagctgctgtccttgaccacatcatggagagcccggtgcgactcagccttctctatgttgtcctggccagcctcctgctcccggggagaagtgtgtttattaaccgggaacgagccaacaacgtcctgcagaggattcggagagcaaactcattttttgaggagataaagaaaggaaatctggaaagggagtgtgtggaagaaatttgttcttttgaagaggcccgcgaagtctttgaggacaatgagaagacgacagaattctggaacaaatatgaagatggtgaccagtgtgagagcagtccttgccagaaccaaggcgagtgtcgagatggccttgggagttatacatgcacctgcacggagggattcgaaggcaaaaactgtgaactctttgttcggaaactctgcagcctagacaacggagactgcgaccagttctgccgtgaggagcagaactcagtggtgtgctcctgtgccaagggttacttcctgggtaatgacggcaagtcctgcctctccacagctcccttcccctgtggaaaaaccaataaaggacgcgcgaagaggtctgtggccctaaataccagcaacagtgaacctgaccctgaagacctcatgcctgatgcagatattctatatcctactgagagtccttctgaactgctcaatctcaacaagacagagcctgaagcaaacagtgatgacgttattcggattgtgggtggccaagaatgcaagagaggagaatgtccttggcaggctctgctctttagcgacgaagagactgatgggttctgtgggggcaccatcttgaatgagttctacatcctcactgccgcccattgtctccatcaagccaagcgattcaaggtgagggtaggggacctgaacacggaacaggaagacggcggcgagatggtgcacgaggtggatatgatcatcaagcacaacaagtttcagagggacacctacgacttcgacattgccatgctgaggctgaagacccccatcacgttccgcgagaacgtggcccctgcctgcttgcctcagaaagactgggccgaggccacactgatgacgcaaaagacaggcatcgtgagcgggtttggacgcacgcacgagaagggccgccagtccaaagtcctgaagatgatggaggtgccctatgtggaccgcaacacctgcaggctctccaccagcttcagcattacgcagaatatgttctgcgcaggctatgacgccaagcaagaggacgcctgccagggggacagcggtggccctcacgtcacacgattcaaagacacctactttgtgaccggcatcgtcagctggggagaggggtgtgcaaggaaagggaaatacggcatctacacgaaggtcacggccttcctcaaatggattgacaggtccatgaaagccagggtggggcccacctctgagaccccaaggttaacccatccaccctattaaagcagtccttctccagaaaaaaaaaaaaaaaaaaaaaaaaaaaaaaaaaaaaaaaaaaaaaaaaaa

SEQ ID NO: 7 - DNA, 1654 bp, Macaca fascicularis
  source 1..1654: mol_type = genomic DNA
ggccgggcgtggactttgctccggcagcctgtcccagtgaggacaggcacacggtactcggccacaccatggggcgcccactgcacctcgtcctgctcagtgccttcttggccagcctcctgctgcccggggaaagtctgttcatccgcagggagcaggccaacaacgtcctggcgagggtcaggaggtccaattcctttcttgaagagatgaagaaaggaaaccttgaaagagagtgcatggaagagacctgctcatacgaagaggcccgcgaggtcttcgaggacagcgacaagacgaatgaattctggaataaatacaaagatggcgaccagtgtgagaccagtccttgccagaacgagggcaaatgtagagacggccttggggaatacacctgcacctgtttagaaggattcgaaggcaaaaactgtgaattgttcacacggaagctctgcagcctggacaacggagagtgtgaccagttctgccacgaggagcagaactcggtggtgtgctcctgcgccagggggtacaccctggccgacaacggcaaggcctgcattcccacaggaccctacccctgtgggaaacagaccctggaacgcaggaagaggtcagcggcccaggccaccaacagcagcggggaagcccccgacaacatcatatggaagccggatgacgcagccgacctggacgccaccgagaacccctttgacctgcttgacttcaaccagacgcagcccgagaggggcgacaacaacctcatcaggatcgtgggcggccgggaatgcgagaacggggagtgtccctggcaggccctgctcatcaacgaggaaaacgaggggttctgtggtggcaccattctgagcgagttctacatcctcactgcagcccactgtctctaccaagccaagagattcaaggtgagggtaggggaccgggacatggagcaggaggagggcggcgaggcggtgcacgaggtggaggtgatcatcaagcacaaccggttcacaaaggagacctatgacttcgacatcgccgtgctccggctcaagagccccatcaccttccgcatgaacgtggcacccgcctgcctccccgagcgcgactgggccgagtccacgctgatgacgcagaagacggggattgtgagcggcttcgggcgcacccacgagaagggccggcagtccaccaggctcaagatgctggaggtgccctacgtggaccgcaacagctgcaagctctccagcagcttcatcatcacccagaacatgttctgtgccggctaccacgccaagcaggaggacgcctgccagggggacagtgggggcccccacgtcacccgcttcaaggacacctacttcgtgacaggcatcgtcagctggggagagggctgcgcccggaaggggaagtacgggatctacaccaaggtcaccgccttcctcaagtggatcgacaggtccatgaaaaccaggggcttgcccaaggctgagagccgtgccccagaggccagcacgtcctctccattaaagtgagatcccacgcaaggcctggtccagatgttgagtccttaccccgctgcatccggcactgtccctaggcctcaagttaaatggccatgaaaaccaagtgaaccttcagtaaacagaagact

SEQ ID NO: 8 - DNA, 1536 bp, Homo sapiens
  source 1..1536: mol_type = genomic DNA
ttgagtgggatctcactttaatggagaggacgttatgacctccggggcatggctcttggccttgggcaagcccctggttttcatggacctgtcgatccacttgaggaaggcggtgaccttggtgtagatcccgtacttccccttacgggcacagccctctccccagctgacgatgcctgtcacgaagtaggtgtccttgaagcgggtgacgtgcgggcccccgctgtccccctggcaggcatcctcctgcttggtgtcgtagccggcacagaacatgttctgggtgatgatgaagctgctggacagcttgcagctgttgcggtccacgtagggcacctccagcatcttgagcctggtggactgccggcccttctcgtgggtgcgcccgaagccgctcacaatccccgtcttctgcgtcatcagcgtggactcggcccagtcacgctcggggaggcaggcaggcgccacgttcatgcggaaggtgatgggggtcttgagccggagcacggcgatgtcgaagtcataggtctcctttgtgaaccggttgtgcttgatgaccacctccacctcgtgcaccgcctcaccgccctcctcctgctccgtgttccggtcccctaccctcaccttgaatctcttggcttggtagagacagtgggctgccgttaggatgtagaactcgctcagaatggttccaccacagaaaccctcgttttcctcattgatgagcagggcctgccagggacactccccgtccttgcattcctggcctcccacgatcctggtgaggttgttgtcgcccctctcaggctgcgtctggttgaagtcaagcaggtcgaaggggttctcggtggggtccaggtcggctgcatcatatggcttccatgtgatgctgtcaggggcctccccgctgctgctggtggcctgggccactgacctcttcctgcgttccagggtctgtttcccacaggggtagggccctgtgggaatgcaggccttgccgttgtcagccagggtgtacccgcgggcgcaggagcacaccacagagttctgttcctcgtggcagaactggtcacagtccccgttgtccaggctgcagagcttccgtgtgaataattcacagtttttgccttcgaatccttctaaacaggtgcaggtgtattccccgaggccgtctttacatttgccctggttctggcaaggactggtctcacactggtcgccatctttgtatttattccagaattcattcgtcttgtcgctgtcctcaaagacctcgcgggcctcttcgtatgagcaggtctcttccatgcactctctttcgaggtgtcctttcttcatctcttcaagaaaggaattggccctcgtgaccctcgccaggatgttgttggcctgctccctgcggatgaacagactttccccgagcagcaggaggccagccagggaggcactgagcaggacgaggtgcagtgggcgccccatggtgtggccgagtactgtgtccctgtcctcactgggacaggctgctggagcaaagtc

SEQ ID NO: 9 - DNA, 1404 bp, Homo sapiens
  source 1..1404: mol_type = genomic DNA
ttgagtgggatctcactttaatggagaggacgttatgacctccggggcatggctcttggccttgggcaagcccctggttttcatggacctgtcgatccacttgaggaaggcggtgaccttggtgtagatcccgtacttccccttacgggcacagccctctccccagctgacgatgcctgtcacgaagtaggtgtccttgaagcgggtgacgtgcgggcccccgctgtccccctggcaggcatcctcctgcttggtgtcgtagccggcacagaacatgttctgggtgatgatgaagctgctggacagcttgcagctgttgcggtccacgtagggcacctccagcatcttgagcctggtggactgccggcccttctcgtgggtgcgcccgaagccgctcacaatccccgtcttctgcgtcatcagcgtggactcggcccagtcacgctcggggaggcaggcaggcgccacgttcatgcggaaggtgatgggggtcttgagccggagcacggcgatgtcgaagtcataggtctcctttgtgaaccggttgtgcttgatgaccacctccacctcgtgcaccgcctcaccgccctcctcctgctccgtgttccggtcccctaccctcaccttgaatctcttggcttggtagagacagtgggctgccgttaggatgtagaactcgctcagaatggttccaccacagaaaccctcgttttcctcattgatgagcagggcctgccagggacactccccgtccttgcattcctggcctcccacgatcctggtgaggttgttgtcgcccctctcaggctgcgtctggttgaagtcaagcaggtcgaaggggttctcggtggggtccaggtcggctgcatcatatggcttccatgtgatgctgtcaggggcctccccgctgctgctggtggcctgggccactgacctcttcctgcgttccagggtctgtttcccacaggggtagggccataattcacagtttttgccttcgaatccttctaaacaggtgcaggtgtattccccgaggccgtctttacatttgccctggttctggcaaggactggtctcacactggtcgccatctttgtatttattccagaattcattcgtcttgtcgctgtcctcaaagacctcgcgggcctcttcgtatgagcaggtctcttccatgcactctctttcgaggtgtcctttcttcatctcttcaagaaaggaattggccctcgtgaccctcgccaggatgttgttggcctgctccctgcggatgaacagactttccccgagcagcaggaggccagccagggaggcactgagcaggacgaggtgcagtgggcgccccatggtgtggccgagtactgtgtccctgtcctcactgggacaggctgctggagcaaagtc

SEQ ID NO: 10 - DNA, 1526 bp, Homo sapiens
  source 1..1526: mol_type = genomic DNA
ttgagtgggatctcactttaatggagaggacgttatgacctccggggcatggctcttggccttgggcaagcccctggttttcatggacctgtcgatccacttgaggaaggcggtgaccttggtgtagatcccgtacttccccttacgggcacagccctctccccagctgacgatgcctgtcacgaagtaggtgtccttgaagcgggtgacgtgcgggcccccgctgtccccctggcaggcatcctcctgcttggtgtcgtagccggcacagaacatgttctgggtgatgatgaagctgctggacagcttgcagctgttgcggtccacgtagggcacctccagcatcttgagcctggtggactgccggcccttctcgtgggtgcgcccgaagccgctcacaatccccgtcttctgcgtcatcagcgtggactcggcccagtcacgctcggggaggcaggcaggcgccacgttcatgcggaaggtgatgggggtcttgagccggagcacggcgatgtcgaagtcataggtctcctttgtgaaccggttgtgcttgatgaccacctccacctcgtgcaccgcctcaccgccctcctcctgctccgtgttccggtccccttgaatctcttggcttggtagagacagtgggctgccgttaggatgtagaactcgctcagaatggttccaccacagaaaccctcgttttcctcattgatgagcagggcctgccagggacactccccgtccttgcattcctggcctcccacgatcctggtgaggttgttgtcgcccctctcaggctgcgtctggttgaagtcaagcaggtcgaaggggttctcggtggggtccaggtcggctgcatcatatggcttccatgtgatgctgtcaggggcctccccgctgctgctggtggcctgggccactgacctcttcctgcgttccagggtctgtttcccacaggggtagggccctgtgggaatgcaggccttgccgttgtcagccagggtgtacccgcgggcgcaggagcacaccacagagttctgttcctcgtggcagaactggtcacagtccccgttgtccaggctgcagagcttccgtgtgaataattcacagtttttgccttcgaatccttctaaacaggtgcaggtgtattccccgaggccgtctttacatttgccctggttctggcaaggactggtctcacactggtcgccatctttgtatttattccagaattcattcgtcttgtcgctgtcctcaaagacctcgcgggcctcttcgtatgagcaggtctcttccatgcactctctttcgaggtgtcctttcttcatctcttcaagaaaggaattggccctcgtgaccctcgccaggatgttgttggcctgctccctgcggatgaacagactttccccgagcagcaggaggccagccagggaggcactgagcaggacgaggtgcagtgggcgccccatggtgtggccgagtactgtgtccctgtcctcactgggacaggctgctggagcaaagtc

SEQ ID NO: 11 - DNA, 2693 bp, Mus musculus
  source 1..2693: mol_type = genomic DNA
tccgggtaaaaggttcctttatttagacaaagaccttagcctctcttcccaggagtctttactttcagtggatgtcacggaaccagtaattccatgttgcctagttcccagaggacagtgagggttctctggccaggctaaggagtagcagagtctaggcctctcaacctaaaacaggggctgaagtccctgtgtctgtgtgtatgtgtgtgtgtgtgtgcacgcgcgcacacacacatactgaaaatcagaaccatatgctatgtctatgggctccatccaagtgtgagcagacaccgaaccccctagagccagcgactccctgagtgtcttctagtctggttcaggaagagagacctttgctcacttgcagcttctttctttctttctttcttccttccttccttccttccttccttcctttctttctttctttctttctttctttctttctttctttcgttcatttgtttgttcgttcgtttgttcgttcattcattttttgagacagggtttctctgtgtagccctggctgtcctggaactcactctgtagaccagtctggcctcaaattcagaaatctgcctgtctctgcctcctgagtgctgagattaaaggtgtgtgccaccactgcccggctgcagcccgtttcgtataccatgaagtcaagggaaataagactgagggaaaagaccccaccacaggtggggcagctgccccaagaacattcctgtttaaggtggcaacattaaacaacaccagatgtgacccagcaggactggagaaggactgctttaattgggcggacctgctgtccttggggtctcggctgtgggtcccaccctggctttcatggacctgtcaatccacttgaggaaggtcgtgacctttgtgtagatgccatatttccctttccttgcacacccctctccccagctgacaatgccggtcacatagtaggtatttttgaaccgtgtgacatgggggccaccactgtccccctggcaggcatcctctaacttggcctcatagcccgcacagaacatattctgtgtgatgctgaagctggtggagagcttgcaggtgttgcgatccacgtagggtacctccagcatcttcaggatgttcgactggcggcccttctcatgcgtgcgtccaaacccgctcacgatgcccgtcttctgtgtcatcagtgtggactcggcccagtctttctgaggcaggcaggcaggggccacgttcatccggaacgtgatgggagtcttcagcctcagcacggcgatatcatagtcgtaggtgtccctctgaaacttgttgtgcttaatgaccacgtccacctcgtgcaccatctcgttgccttcttccttctctgtgttccgatcacctaccctcaccttgaatcgcctggcctgatggagacagtgggcagcagtgaggatgtagaactcattcaagatggtgcccccacagaacccttcattgtcttcgttaatgagcagagcctgccagggacattctccatccttgcattcccggccacccacaatccgaacaaggtcatcgctgctcctctcaggctgtgtctcgttgaggttgagcagttcaataggattctccgtaggggacaggaaatcctcatcaagcagggcgtcttcaaggtcaagctcactgtcgctggtgtttagggccacagacctcttcctacgtcctgtagtgatttttccacaggggaagggagctgtggagatgcaagacttgccatcattacccaggaagtaaccgctggcgcaggagcacaccactgagttctgctcttctctgcagaactggtcacagtctccgttgtctaggcggcagagtttccgaacaaagagctcacagtttttgccttcaaatccctccgagcaggtgcacgtgtaacccccgatgccatctcgacacgctccttggttctggcaagggctgctttcacactggtcgccgtctttatatttggtccagtattctttcgtcttctcgtcgtcctcgaagatttcacggacctcttcataagaacaaatttcttccatacactctctttccagatttcctttcttgaactcttcaaaaaatgagtttgccctccgagtcctcgccaggacattgttggcacgttcccggttaataaacacacctttcccagggagcaggaggctggccaggacaacacagagcaggctgagttgcaccgggctccccatggtgtggtcaaggacggcagtggctgtgacaggcatggggcaaggttcactcaccctgggccccaggtggccatgggccttctgcttatctcagccttctgattggagccctgggccagcaatgaggtcaggggactggggactgtggtgaccagccccagcctttctaggggaggctacccttatccagaactgccaggcagggcctgcttcccagctggtagaggggtcagtcccccctccttgttttaaggaacagaagttgaaacaggcatgaggcaaagcatgggtgtcaggtcagatgtgggatttgaatccaagccctcaatcttctggctgggccctgctgactccgggcgggcagaggtgtaggtgtgaggtttatgtgtctcttggacaatggctatatattgtagtcacggaaacaggctgagctattggggaacaggaacc

SEQ ID NO: 12 - DNA, 2503 bp, Mus musculus
  source 1..2503: mol_type = genomic DNA
tccgggtaaaaggttcctttatttagacaaagaccttagcctctcttcccaggagtctttactttcagtggatgtcacggaaccagtaattccatgttgcctagttcccagaggacagtgagggttctctggccaggctaaggagtagcagagtctaggcctctcaacctaaaacaggggctgaagtccctgtgtctgtgtgtatgtgtgtgtgtgtgtgcacgcgcgcacacacacatactgaaaatcagaaccatatgctatgtctatgggctccatccaagtgtgagcagacaccgaaccccctagagccagcgactccctgagtgtcttctagtctggttcaggaagagagacctttgctcacttgcagcttctttctttctttctttcttccttccttccttccttccttccttcctttctttctttctttctttctttctttctttctttctttcgttcatttgtttgttcgttcgtttgttcgttcattcattttttgagacagggtttctctgtgtagccctggctgtcctggaactcactctgtagaccagtctggcctcaaattcagaaatctgcctgtctctgcctcctgagtgctgagattaaaggtgtgtgccaccactgcccggctgcagcccgtttcgtataccatgaagtcaagggaaataagactgagggaaaagaccccaccacaggtggggcagctgccccaagaacattcctgtttaaggtggcaacattaaacaacaccagatgtgacccagcaggactggagaaggactgctttaattgggcggacctgctgtccttggggtctcggctgtgggtcccaccctggctttcatggacctgtcaatccacttgaggaaggtcgtgacctttgtgtagatgccatatttccctttccttgcacacccctctccccagctgacaatgccggtcacatagtaggtatttttgaaccgtgtgacatgggggccaccactgtccccctggcaggcatcctctaacttggcctcatagcccgcacagaacatattctgtgtgatgctgaagctggtggagagcttgcaggtgttgcgatccacgtagggtacctccagcatcttcaggatgttcgactggcggcccttctcatgcgtgcgtccaaacccgctcacgatgcccgtcttctgtgtcatcagtgtggactcggcccagtctttctgaggcaggcaggcaggggccacgttcatccggaacgtgatgggagtcttcagcctcagcacggcgatatcatagtcgtaggtgtccctctgaaacttgttgtgcttaatgaccacgtccacctcgtgcaccatctcgttgccttcttccttctctgtgttccgatcacctaccctcaccttgaatcgcctggcctgatggagacagtgggcagcagtgaggatgtagaactcattcaagatggtgcccccacagaacccttcattgtcttcgttaatgagcagagcctgccagggacattctccatccttgcattcccggccacccacaatccgaacaaggtcatcgctgctcctctcaggctgtgtctcgttgaggttgagcagttcaataggattctccgtaggggacaggaaatcctcatcaagcagggcgtcttcaaggtcaagctcactgtcgctggtgtttagggccacagacctcttcctacgtcctgtagtgatttttccacaggggaagggagctgtggagatgcaagacttgccatcattacccaggaagtaaccgctggcgcaggagcacaccactgagttctgctcttctctgcagaactggtcacagtctccgttgtctaggcggcagagtttccgaacaaagagctcacagtttttgccttcaaatccctccgagcaggtgcacgtgtaacccccgatgccatctcgacacgctccttggttctggcaagggctgctttcacactggtcgccgtctttatatttggtccagtattctttcgtcttctcgtcgtcctcgaagatttcacggacctcttcataagaacaaatttcttccatacactctctttccagatttcctttcttgaactcttcaaaaaatgagtttgccctccgagtcctcgccaggacattgttggcacgttcccggttaataaacacacctttcccagggagcaggaggctggccaggacaacacagagcaggctgagttgcaccgggctccccatggtgtggtcaaggacggcagtggccagctggtagaggggtcagtcccccctccttgttttaaggaacagaagttgaaacaggcatgaggcaaagcatgggtgtcaggtcagatgtgggatttgaatccaagccctcaatcttctggctgggccctgctgactccgggcgggcagaggtgtaggtgtgaggtttatgtgtctcttggacaatggctatatattgtagtcacggaaacaggctgagctattggggaacaggaacc

SEQ ID NO: 13 - DNA, 1618 bp, Rattus norvegicus
  source 1..1618: mol_type = genomic DNA
ttttttttttttttttttttttttttttttttttttttttttttttttttctggagaaggactgctttaatagggtggatgggttaaccttggggtctcagaggtgggccccaccctggctttcatggacctgtcaatccatttgaggaaggccgtgaccttcgtgtagatgccgtatttccctttccttgcacacccctctccccagctgacgatgccggtcacaaagtaggtgtctttgaatcgtgtgacgtgagggccaccgctgtccccctggcaggcgtcctcttgcttggcgtcatagcctgcgcagaacatattctgcgtaatgctgaagctggtggagagcctgcaggtgttgcggtccacatagggcacctccatcatcttcaggactttggactggcggcccttctcgtgcgtgcgtccaaacccgctcacgatgcctgtcttttgcgtcatcagtgtggcctcggcccagtctttctgaggcaagcaggcaggggccacgttctcgcggaacgtgatgggggtcttcagcctcagcatggcaatgtcgaagtcgtaggtgtccctctgaaacttgttgtgcttgatgatcatatccacctcgtgcaccatctcgccgccgtcttcctgttccgtgttcaggtcccctaccctcaccttgaatcgcttggcttgatggagacaatgggcggcagtgaggatgtagaactcattcaagatggtgcccccacagaacccatcagtctcttcgtcgctaaagagcagagcctgccaaggacattctcctctcttgcattcttggccacccacaatccgaataacgtcatcactgtttgcttcaggctctgtcttgttgagattgagcagttcagaaggactctcagtaggatatagaatatctgcatcaggcatgaggtcttcagggtcaggttcactgttgctggtatttagggccacagacctcttcgcgcgtcctttattggtttttccacaggggaagggagctgtggagaggcaggacttgccgtcattacccaggaagtaacccttggcacaggagcacaccactgagttctgctcctcacggcagaactggtcgcagtctccgttgtctaggctgcagagtttccgaacaaagagttcacagtttttgccttcgaatccctccgtgcaggtgcatgtataactcccaaggccatctcgacactcgccttggttctggcaaggactgctctcacactggtcaccatcttcatatttgttccagaattctgtcgtcttctcattgtcctcaaagacttcgcgggcctcttcaaaagaacaaatttcttccacacactccctttccagatttcctttctttatctcctcaaaaaatgagtttgctctccgaatcctctgcaggacgttgttggctcgttcccggttaataaacacacttctccccgggagcaggaggctggccaggacaacatagagaaggctgagtcgcaccgggctctccatgatgtggtcaaggacagcagctgctgtgacaggcatggggcaaggttcactcaccctaggccccaggtggccatggtcagtctgcttatctcagccttctgat

SEQ ID NO: 14 - DNA, 1654 bp, Macaca fascicularis
  source 1..1654: mol_type = genomic DNA
agtcttctgtttactgaaggttcacttggttttcatggccatttaacttgaggcctagggacagtgccggatgcagcggggtaaggactcaacatctggaccaggccttgcgtgggatctcactttaatggagaggacgtgctggcctctggggcacggctctcagccttgggcaagcccctggttttcatggacctgtcgatccacttgaggaaggcggtgaccttggtgtagatcccgtacttccccttccgggcgcagccctctccccagctgacgatgcctgtcacgaagtaggtgtccttgaagcgggtgacgtgggggcccccactgtccccctggcaggcgtcctcctgcttggcgtggtagccggcacagaacatgttctgggtgatgatgaagctgctggagagcttgcagctgttgcggtccacgtagggcacctccagcatcttgagcctggtggactgccggcccttctcgtgggtgcgcccgaagccgctcacaatccccgtcttctgcgtcatcagcgtggactcggcccagtcgcgctcggggaggcaggcgggtgccacgttcatgcggaaggtgatggggctcttgagccggagcacggcgatgtcgaagtcataggtctcctttgtgaaccggttgtgcttgatgatcacctccacctcgtgcaccgcctcgccgccctcctcctgctccatgtcccggtcccctaccctcaccttgaatctcttggcttggtagagacagtgggctgcagtgaggatgtagaactcgctcagaatggtgccaccacagaacccctcgttttcctcgttgatgagcagggcctgccagggacactccccgttctcgcattcccggccgcccacgatcctgatgaggttgttgtcgcccctctcgggctgcgtctggttgaagtcaagcaggtcaaaggggttctcggtggcgtccaggtcggctgcgtcatccggcttccatatgatgttgtcgggggcttccccgctgctgttggtggcctgggccgctgacctcttcctgcgttccagggtctgtttcccacaggggtagggtcctgtgggaatgcaggccttgccgttgtcggccagggtgtaccccctggcgcaggagcacaccaccgagttctgctcctcgtggcagaactggtcacactctccgttgtccaggctgcagagcttccgtgtgaacaattcacagtttttgccttcgaatccttctaaacaggtgcaggtgtattccccaaggccgtctctacatttgccctcgttctggcaaggactggtctcacactggtcgccatctttgtatttattccagaattcattcgtcttgtcgctgtcctcgaagacctcgcgggcctcttcgtatgagcaggtctcttccatgcactctctttcaaggtttcctttcttcatctcttcaagaaaggaattggacctcctgaccctcgccaggacgttgttggcctgctccctgcggatgaacagactttccccgggcagcaggaggctggccaagaaggcactgagcaggacgaggtgcagtgggcgccccatggtgtggccgagtaccgtgtgcctgtcctcactgggacaggctgccggagcaaagtccacgcccggcc

SEQ ID NO: 15 - protein, 16 aa, unidentified
  REGION 1..16: note = source = /note="Description of Unknown: RFGF peptide sequence"
AAVALLPAVLLALLAP

SEQ ID NO: 16 - protein, 11 aa, unidentified
  REGION 1..11: note = source = /note="Description of Unknown: RFGF analogue peptide sequence"
AALLPVLLAAP

SEQ ID NO: 17 - protein, 13 aa, Human immunodeficiency virus
GRKKRRQRRRPPQ

SEQ ID NO: 18 - protein, 16 aa, Drosophila sp.
RQIKIWFQNRRMKWKK

SEQ ID NO: 19 - DNA, 21 bp, synthetic construct
  source 1..21: mol_type = other DNA
  modified_base 1: mod_base = OTHER; note = 2'-O-methylcytidine-3'-phosphate
  modified_base 2: mod_base = OTHER; note = 2'-O-methyluridine-3'-phosphate
  modified_base 3: mod_base = OTHER; note = 2'-O-methyluridine-3'-phosphate
  modified_base 4: mod_base = OTHER; note = adenosine-3'-phosphate
  modified_base 5: mod_base = OTHER; note = 2'-O-methylcytidine-3'-phosphate
  modified_base 6: mod_base = OTHER; note = guanosine-3'-phosphate
  modified_base 7: mod_base = OTHER; note = 2'-O-methylcytidine-3'-phosphate
  modified_base 8: mod_base = OTHER; note = 2'-O-methyluridine-3'-phosphate
  modified_base 9: mod_base = OTHER; note = guanosine-3'-phosphate
  modified_base 10: mod_base = OTHER; note = adenosine-3'-phosphate
  modified_base 11: mod_base = OTHER; note = guanosine-3'-phosphate
  modified_base 12: mod_base = OTHER; note = 2'-O-methyluridine-3'-phosphate
  modified_base 13: mod_base = OTHER; note = adenosine-3'-phosphate
  modified_base 14: mod_base = OTHER; note = 2'-O-methylcytidine-3'-phosphate
  modified_base 15: mod_base = OTHER; note = 2'-O-methyluridine-3'-phosphate
  modified_base 16: mod_base = OTHER; note = 2'-O-methyluridine-3'-phosphate
  modified_base 17: mod_base = OTHER; note = 2'-O-methylcytidine-3'-phosphate
  modified_base 18: mod_base = OTHER; note = guanosine-3'-phosphate
  modified_base 19: mod_base = OTHER; note = adenosine-3'-phosphate
  modified_base 20: mod_base = OTHER; note = 2'-deoxythymidine-3'-phosphorothioate
  misc_feature 1..19: note = RNA
  misc_feature 20..21: note = DNA
cttacgctgagtacttcgatt

SEQ ID NO: 20 - DNA, 21 bp, synthetic construct
  source 1..21: mol_type = other DNA
  modified_base 1: mod_base = OTHER; note = uridine-3'-phosphate
  modified_base 2: mod_base = OTHER; note = cytidine-3'-phosphate
  modified_base 3: mod_base = OTHER; note = guanosine-3'-phosphate
  modified_base 4: mod_base = OTHER; note = adenosine-3'-phosphate
  modified_base 5: mod_base = OTHER; note = adenosine-3'-phosphate
  modified_base 6: mod_base = OTHER; note = guanosine-3'-phosphate
  modified_base 7: mod_base = OTHER; note = 2'-O-methyluridine-3'-phosphate
  modified_base 8: mod_base = OTHER; note = adenosine-3'-phosphate
  modified_base 9: mod_base = OTHER; note = cytidine-3'-phosphate
  modified_base 10: mod_base = OTHER; note = uridine-3'-phosphate
  modified_base 11: mod_base = OTHER; note = 2'-O-methylcytidine-3'-phosphate
  modified_base 12: mod_base = OTHER; note = adenosine-3'-phosphate
  modified_base 13: mod_base = OTHER; note = guanosine-3'-phosphate
  modified_base 14: mod_base = OTHER; note = cytidine-3'-phosphate
  modified_base 15: mod_base = OTHER; note = guanosine-3'-phosphate
  modified_base 16: mod_base = OTHER; note = 2'-O-methyluridine-3'-phosphate
  modified_base 17: mod_base = OTHER; note = adenosine-3'-phosphate
  modified_base 18: mod_base = OTHER; note = adenosine-3'-phosphate
  modified_base 19: mod_base = OTHER; note = guanosine-3'-phosphate
  modified_base 20: mod_base = OTHER; note = 2'-deoxythymidine-3'-phosphorothioate
  misc_feature 1..19: note = RNA
  misc_feature 20..21: note = DNA
tcgaagtactcagcgtaagtt

SEQ ID NO: 21 - RNA, 21 nt, synthetic construct
  source 1..21: mol_type = other RNA
ctccagcagcctgtcccagtt

SEQ ID NO: 22 - RNA, 21 nt, synthetic construct
  source 1..21: mol_type = other RNA
tgtcccagtgaggacagggat

SEQ ID NO: 23 - RNA, 21 nt, synthetic construct
  source 1..21: mol_type = other RNA
agggacacagtactcggccat

SEQ ID NO: 24 - RNA, 21 nt, synthetic construct
  source 1..21: mol_type = other RNA
cctcgtcctgctcagtgcctt

SEQ ID NO: 25 - RNA, 21 nt, synthetic construct
  source 1..21: mol_type = other RNA
gaaagtctgttcatccgcagt

SEQ ID NO: 26 - RNA, 21 nt, synthetic construct
  source 1..21: mol_type = other RNA
ccgcagggagcaggccaacat

SEQ ID NO: 27 - RNA, 21 nt, synthetic construct
  source 1..21: mol_type = other RNA
gcaggccaacaacatcctggt

SEQ ID NO: 28 - RNA, 21 nt, synthetic construct
  source 1..21: mol_type = other RNA
atcctggcgagggtcacgagt

SEQ ID NO: 29 - RNA, 21 nt, synthetic construct
  source 1..21: mol_type = other RNA
tcacgagggccaattcctttt

SEQ ID NO: 30 - RNA, 21 nt, synthetic construct
  source 1..21: mol_type = other RNA
ccaattcctttcttgaagagt

SEQ ID NO: 31 - RNA, 21 nt, synthetic construct
  source 1..21: mol_type = other RNA
ttcttgaagagatgaagaaat

SEQ ID NO: 32 - RNA, 21 nt, synthetic construct
  source 1..21: mol_type = other RNA
agaaaggacacctcgaaagat

SEQ ID NO: 33 - RNA, 21 nt, synthetic construct
  source 1..21: mol_type = other RNA
acctcgaaagagagtgcatgt

SEQ ID NO: 34 - RNA, 21 nt, synthetic construct
  source 1..21: mol_type = other RNA
gtgcatggaagagacctgctt

SEQ ID NO: 35 - RNA, 21 nt, synthetic construct
  source 1..21: mol_type = other RNA
gacctgctcatacgaagaggt

SEQ ID NO: 36 - RNA, 21 nt, synthetic construct
  source 1..21: mol_type = other RNA
gaagaggcccgcgaggtcttt

SEQ ID NO: 37 - RNA, 21 nt, synthetic construct
  source 1..21: mol_type = other RNA
cgcgaggtctttgaggacagt

SEQ ID NO: 38 - RNA, 21 nt, synthetic construct
  source 1..21: mol_type = other RNA
tgaggacagcgacaagacgat

SEQ ID NO: 39 - RNA, 21 nt, synthetic construct
  source 1..21: mol_type = other RNA
cgacaagacgaatgaattctt

SEQ ID NO: 40 - RNA, 21 nt, synthetic construct
  source 1..21: mol_type = other RNA
gaatgaattctggaataaatt

SEQ ID NO: 41 - RNA, 21 nt, synthetic construct
  source 1..21: mol_type = other RNA
ctggaataaatacaaagatgt

SEQ ID NO: 42 - RNA, 21 nt, synthetic construct
  source 1..21: mol_type = other RNA
acaaagatggcgaccagtgtt

SEQ ID NO: 43 - RNA, 21 nt, synthetic construct
  source 1..21: mol_type = other RNA
cgaccagtgtgagaccagtct

SEQ ID NO: 44 - RNA, 21 nt, synthetic construct
  source 1..21: mol_type = other RNA
agaccagtccttgccagaact

SEQ ID NO: 45 - RNA, 21 nt, synthetic construct
  source 1..21: mol_type = other RNA
ttgccagaaccagggcaaatt

SEQ ID NO: 46 - RNA, 21 nt, synthetic construct
  source 1..21: mol_type = other RNA
ccagggcaaatgtaaagacgt

SEQ ID NO: 47 - RNA, 21 nt, synthetic construct
  source 1..21: mol_type = other RNA
acacctgcacctgtttagaat

SEQ ID NO: 48 - RNA, 21 nt, synthetic construct
  source 1..21: mol_type = other RNA
cctgtttagaaggattcgaat

SEQ ID NO: 49 - RNA, 21 nt, synthetic construct
  source 1..21: mol_type = other RNA
aactgtgaattattcacacgt

SEQ ID NO: 50 - RNA, 21 nt, synthetic construct
  source 1..21: mol_type = other RNA
ttattcacacggaagctctgt

SEQ ID NO: 51 - RNA, 21 nt, synthetic construct
  source 1..21: mol_type = other RNA
ctctgcagcctggacaacggt

SEQ ID NO: 52 - RNA, 21 nt, synthetic construct
  source 1..21: mol_type = other RNA
tgtgaccagttctgccacgat

SEQ ID NO: 53 - RNA, 21 nt, synthetic construct
  source 1..21: mol_type = other RNA
cacgaggaacagaactctgtt

SEQ ID NO: 54 - RNA, 21 nt, synthetic construct
  source 1..21: mol_type = other RNA
gaactctgtggtgtgctcctt

SEQ ID NO: 55 - RNA, 21 nt, synthetic construct
  source 1..21: mol_type = other RNA
cctggctgacaacggcaaggt

SEQ ID NO: 56 - RNA, 21 nt, synthetic construct
  source 1..21: mol_type = other RNA
aggcctgcattcccacagggt

SEQ ID NO: 57 - RNA, 21 nt, synthetic construct
  source 1..21: mol_type = other RNA
tgtgggaaacagaccctggat

SEQ ID NO: 58 - RNA, 21 nt, synthetic construct
  source 1..21: mol_type = other RNA
agaccctggaacgcaggaagt

SEQ ID NO: 59 - RNA, 21 nt, synthetic construct
  source 1..21: mol_type = other RNA
aacgcaggaagaggtcagtgt

SEQ ID NO: 60 - RNA, 21 nt, synthetic construct
  source 1..21: mol_type = other RNA
ctgacagcatcacatggaagt

SEQ ID NO: 61 - RNA, 21 nt, synthetic construct
  source 1..21: mol_type = other RNA
tcacatggaagccatatgatt

SEQ ID NO: 62 - RNA, 21 nt, synthetic construct
  source 1..21: mol_type = other RNA
agccatatgatgcagccgact

SEQ ID NO: 63 - RNA, 21 nt, synthetic construct
  source 1..21: mol_type = other RNA
ctgcttgacttcaaccagact

SEQ ID NO: 64 - RNA, 21 nt, synthetic construct
  source 1..21: mol_type = other RNA
ttcaaccagacgcagcctgat

SEQ ID NO: 65 - RNA, 21 nt, synthetic construct
  source 1..21: mol_type = other RNA
cgacaacaacctcaccaggat

SEQ ID NO: 66 - RNA, 21 nt, synthetic construct
  source 1..21: mol_type = other RNA
cctcaccaggatcgtgggagt

SEQ ID NO: 67 - RNA, 21 nt, synthetic construct
  source 1..21: mol_type = other RNA
aggccaggaatgcaaggacgt

SEQ ID NO: 68 - RNA, 21 nt, synthetic construct
  source 1..21: mol_type = other RNA
tggcaggccctgctcatcaat

SEQ ID NO: 69 - RNA, 21 nt, synthetic construct
  source 1..21: mol_type = other RNA
ctgctcatcaatgaggaaaat

SEQ ID NO: 70 - RNA, 21 nt, synthetic construct
  source 1..21: mol_type = other RNA
aatgaggaaaacgagggtttt

SEQ ID NO: 71 - RNA, 21 nt, synthetic construct
  source 1..21: mol_type = other RNA
aacgagggtttctgtggtggt

SEQ ID NO: 72 - RNA, 21 nt, synthetic construct
  source 1..21: mol_type = other RNA
ttctgtggtggaaccattctt

SEQ ID NO: 73 - RNA, 21 nt, synthetic construct
  source 1..21: mol_type = other RNA
aaccattctgagcgagttctt

SEQ ID NO: 74 - RNA, 21 nt, synthetic construct
  source 1..21: mol_type = other RNA
gagcgagttctacatcctaat

SEQ ID NO: 75 - RNA, 21 nt, synthetic construct
  source 1..21: mol_type = other RNA
ctacatcctaacggcagccct

SEQ ID NO: 76 - RNA, 21 nt, synthetic construct
  source 1..21: mol_type = other RNA
aacggcagcccactgtctctt

SEQ ID NO: 77 - RNA, 21 nt, synthetic construct
  source 1..21: mol_type = other RNA
ccactgtctctaccaagccat

SEQ ID NO: 78 - RNA, 21 nt, synthetic construct
  source 1..21: mol_type = other RNA
taccaagccaagagattcaat

SEQ ID NO: 79 - RNA, 21 nt, synthetic construct
  source 1..21: mol_type = other RNA
agagattcaaggtgagggtat

SEQ ID NO: 80 - RNA, 21 nt, synthetic construct
  source 1..21: mol_type = other RNA
gaggtggaggtggtcatcaat

SEQ ID NO: 81 - RNA, 21 nt, synthetic construct
  source 1..21: mol_type = other RNA
gtggtcatcaagcacaaccgt

SEQ ID NO: 82 - RNA, 21 nt, synthetic construct
  source 1..21: mol_type = other RNA
aagcacaaccggttcacaaat

SEQ ID NO: 83 - RNA, 21 nt, synthetic construct
  source 1..21: mol_type = other RNA
acaaaggagacctatgacttt

SEQ ID NO: 84 - RNA, 21 nt, synthetic construct
  source 1..21: mol_type = other RNA
acctatgacttcgacatcgct

SEQ ID NO: 85 - RNA, 21 nt, synthetic construct
  source 1..21: mol_type = other RNA
ttcgacatcgccgtgctccgt

SEQ ID NO: 86 - RNA, 21 nt, synthetic construct
  source 1..21: mol_type = other RNA
atcaccttccgcatgaacgtt

SEQ ID NO: 87 - RNA, 21 nt, synthetic construct
  source 1..21: mol_type = other RNA
tgggccgagtccacgctgatt

SEQ ID NO: 88 - RNA, 21 nt, synthetic construct
  source 1..21: mol_type = other RNA
acgctgatgacgcagaagact

SEQ ID NO: 89 - RNA, 21 nt, synthetic construct
  source 1..21: mol_type = other RNA
cagtccaccaggctcaagatt

SEQ ID NO: 90 - RNA, 21 nt, synthetic construct
  source 1..21: mol_type = other RNA
aggctcaagatgctggaggtt

SEQ ID NO: 91 - RNA, 21 nt, synthetic construct
  source 1..21: mol_type = other RNA
ctggaggtgccctacgtggat

SEQ ID NO: 92 - RNA, 21 nt, synthetic construct
  source 1..21: mol_type = other RNA
ctacgtggaccgcaacagctt

SEQ ID NO: 93 - RNA, 21 nt, synthetic construct
  source 1..21: mol_type = other RNA
ccgcaacagctgcaagctgtt

SEQ ID NO: 94 - RNA, 21 nt, synthetic construct
  source 1..21: mol_type = other RNA
ctgcaagctgtccagcagctt

SEQ ID NO: 95 - RNA, 21 nt, synthetic construct
  source 1..21: mol_type = other RNA
gtccagcagcttcatcatcat

SEQ ID NO: 96 - RNA, 21 nt, synthetic construct
  source 1..21: mol_type = other RNA
catcacccagaacatgttctt

SEQ ID NO: 97 - RNA, 21 nt, synthetic construct
  source 1..21: mol_type = other RNA
gaacatgttctgtgccggctt

SEQ ID NO: 98 - RNA, 21 nt, synthetic construct
  source 1..21: mol_type = other RNA
ccggctacgacaccaagcagt

SEQ ID NO: 99 - RNA, 21 nt, synthetic construct
  source 1..21: mol_type = other RNA
caccaagcaggaggatgcctt

SEQ ID NO: 100 - RNA, 21 nt, synthetic construct
  source 1..21: mol_type = other RNA
ccgcttcaaggacacctactt

SEQ ID NO: 101 - RNA, 21 nt, synthetic construct
  source 1..21: mol_type = other RNA
ggacacctacttcgtgacagt

SEQ ID NO: 102 - RNA, 21 nt, synthetic construct
  source 1..21: mol_type = other RNA
cgtgacaggcatcgtcagctt

SEQ ID NO: 103 - RNA, 21 nt, synthetic construct
  source 1..21: mol_type = other RNA
tacgggatctacaccaaggtt

SEQ ID NO: 104 - RNA, 21 nt, synthetic construct
  source 1..21: mol_type = other RNA
tacaccaaggtcaccgccttt

SEQ ID NO: 105 - RNA, 21 nt, synthetic construct
  source 1..21: mol_type = other RNA
cgccttcctcaagtggatcgt

SEQ ID NO: 106 - RNA, 21 nt, synthetic construct
  source 1..21: mol_type = other RNA
caagtggatcgacaggtccat

SEQ ID NO: 107 - RNA, 21 nt, synthetic construct
  source 1..21: mol_type = other RNA
cgacaggtccatgaaaaccat

SEQ ID NO: 108 - RNA, 21 nt, synthetic construct
  source 1..21: mol_type = other RNA
ttgcccaaggccaagagccat

SEQ ID NO: 109 - RNA, 21 nt, synthetic construct
  source 1..21: mol_type = other RNA
tcataacgtcctctccattat

SEQ ID NO: 110 - RNA, 21 nt, synthetic construct
  source 1..21: mol_type = other RNA
cctctccattaaagtgagatt

SEQ ID NO: 111 - RNA, 23 nt, synthetic construct
  source 1..23: mol_type = other RNA
aactgggacaggctgctggagca

SEQ ID NO: 112 - RNA, 23 nt, synthetic construct
  source 1..23: mol_type = other RNA
atccctgtcctcactgggacagg

SEQ ID NO: 113 - RNA, 23 nt, synthetic construct
  source 1..23: mol_type = other RNA
atggccgagtactgtgtccctgt

SEQ ID NO: 114 - RNA, 23 nt, synthetic construct
  source 1..23: mol_type = other RNA
aaggcactgagcaggacgaggtg

SEQ ID NO: 115 - RNA, 23 nt, synthetic construct
  source 1..23: mol_type = other RNA
actgcggatgaacagactttccc

SEQ ID NO: 116 - RNA, 23 nt, synthetic construct
  source 1..23: mol_type = other RNA
atgttggcctgctccctgcggat

SEQ ID NO: 117 - RNA, 23 nt, synthetic construct
  source 1..23: mol_type = other RNA
accaggatgttgttggcctgctc

SEQ ID NO: 118 - RNA, 23 nt, synthetic construct
  source 1..23: mol_type = other RNA
actcgtgaccctcgccaggatgt

SEQ ID NO: 119 - RNA, 23 nt, synthetic construct
  source 1..23: mol_type = other RNA
aaaaggaattggccctcgtgacc

SEQ ID NO: 120 - RNA, 23 nt, synthetic construct
  source 1..23: mol_type = other RNA
actcttcaagaaaggaattggcc

SEQ ID NO: 121 - RNA, 23 nt, synthetic construct
  source 1..23: mol_type = other RNA
atttcttcatctcttcaagaaag

SEQ ID NO: 122 - RNA, 23 nt, synthetic construct
  source 1..23: mol_type = other RNA
atctttcgaggtgtcctttcttc

SEQ ID NO: 123 - RNA, 23 nt, synthetic construct
  source 1..23: mol_type = other RNA
acatgcactctctttcgaggtgt

SEQ ID NO: 124 - RNA, 23 nt, synthetic construct
  source 1..23: mol_type = other RNA
aagcaggtctcttccatgcactc

SEQ ID NO: 125 - RNA, 23 nt, synthetic construct
  source 1..23: mol_type = other RNA
acctcttcgtatgagcaggtctc

SEQ ID NO: 126 - RNA, 23 nt, synthetic construct
  source 1..23: mol_type = other RNA
aaagacctcgcgggcctcttcgt

SEQ ID NO: 127 - RNA, 23 nt, synthetic construct
  source 1..23: mol_type = other RNA
actgtcctcaaagacctcgcggg

SEQ ID NO: 128 - RNA, 23 nt, synthetic construct
  source 1..23: mol_type = other RNA
atcgtcttgtcgctgtcctcaaa

SEQ ID NO: 129 - RNA, 23 nt, synthetic construct
  source 1..23: mol_type = other RNA
aagaattcattcgtcttgtcgct

SEQ ID NO: 130 - RNA, 23 nt, synthetic construct
  source 1..23: mol_type = other RNA
aatttattccagaattcattcgt

SEQ ID NO: 131 - RNA, 23 nt, synthetic construct
  source 1..23: mol_type = other RNA
acatctttgtatttattccagaa

SEQ ID NO: 132 - RNA, 23 nt, synthetic construct
  source 1..23: mol_type = other RNA
aacactggtcgccatctttgtat

SEQ ID NO: 133 - RNA, 23 nt, synthetic construct
  source 1..23: mol_type = other RNA
agactggtctcacactggtcgcc

SEQ ID NO: 134 - RNA, 23 nt, synthetic construct
  source 1..23: mol_type = other RNA
agttctggcaaggactggtctca

SEQ ID NO: 135 - RNA, 23 nt, synthetic construct
  source 1..23: mol_type = other RNA
aatttgccctggttctggcaagg

SEQ ID NO: 136 - RNA, 23 nt, synthetic construct
  source 1..23: mol_type = other RNA
acgtctttacatttgccctggtt

SEQ ID NO: 137 - RNA, 23 nt, synthetic construct
  source 1..23: mol_type = other RNA
attctaaacaggtgcaggtgtat

SEQ ID NO: 138 - RNA, 23 nt, synthetic construct
  source 1..23: mol_type = other RNA
attcgaatccttctaaacaggtg

SEQ ID NO: 139 - RNA, 23 nt, synthetic construct
  source 1..23: mol_type = other RNA
acgtgtgaataattcacagtttt

SEQ ID NO: 140 - RNA, 23 nt, synthetic construct
  source 1..23: mol_type = other RNA
acagagcttccgtgtgaataatt

SEQ ID NO: 141 - RNA, 23 nt, synthetic construct
  source 1..23: mol_type = other RNA
accgttgtccaggctgcagagct

SEQ ID NO: 142 - RNA, 23 nt, synthetic construct
  source 1..23: mol_type = other RNA
atcgtggcagaactggtcacagt

SEQ ID NO: 143 - RNA, 23 nt, synthetic construct
  source 1..23: mol_type = other RNA
aacagagttctgttcctcgtggc

SEQ ID NO: 144 - RNA, 23 nt, synthetic construct
  source 1..23: mol_type = other RNA
aaggagcacaccacagagttctg

SEQ ID NO: 145 - RNA, 23 nt, synthetic construct
  source 1..23: mol_type = other RNA
accttgccgttgtcagccagggt

SEQ ID NO: 146 - RNA, 23 nt, synthetic construct
  source 1..23: mol_type = other RNA
accctgtgggaatgcaggccttg

SEQ ID NO: 147 - RNA, 23 nt, synthetic construct
  source 1..23: mol_type = other RNA
atccagggtctgtttcccacagg

SEQ ID NO: 148 - RNA, 23 nt, synthetic construct
  source 1..23: mol_type = other RNA
acttcctgcgttccagggtctgt

SEQ ID NO: 149 - RNA, 23 nt, synthetic construct
  source 1..23: mol_type = other RNA
acactgacctcttcctgcgttcc

SEQ ID NO: 150 - RNA, 23 nt, synthetic construct
  source 1..23: mol_type = other RNA
acttccatgtgatgctgtcaggg

SEQ ID NO: 151 - RNA, 23 nt, synthetic construct
  source 1..23: mol_type = other RNA
aatcatatggcttccatgtgatg

SEQ ID NO: 152 - RNA, 23 nt, synthetic construct
  source 1..23: mol_type = other RNA
agtcggctgcatcatatggcttc

SEQ ID NO: 153 - RNA, 23 nt, synthetic construct
  source 1..23: mol_type = other RNA
agtctggttgaagtcaagcaggt

SEQ ID NO: 154 - RNA, 23 nt, synthetic construct
  source 1..23: mol_type = other RNA
atcaggctgcgtctggttgaagt

SEQ ID NO: 155 - RNA, 23 nt, synthetic construct
  source 1..23: mol_type = other RNA
atcctggtgaggttgttgtcgcc

SEQ ID NO: 156 - RNA, 23 nt, synthetic construct
  source 1..23: mol_type = other RNA
actcccacgatcctggtgaggtt

SEQ ID NO: 157 - RNA, 23 nt, synthetic construct
  source 1..23: mol_type = other RNA
acgtccttgcattcctggcctcc

SEQ ID NO: 158 - RNA, 23 nt, synthetic construct
  source 1..23: mol_type = other RNA
attgatgagcagggcctgccagg

SEQ ID NO: 159 - RNA, 23 nt, synthetic construct
  source 1..23: mol_type = other RNA
attttcctcattgatgagcaggg

SEQ ID NO: 160 - RNA, 23 nt, synthetic construct
  source 1..23: mol_type = other RNA
aaaaccctcgttttcctcattga

SEQ ID NO: 161 - RNA, 23 nt, synthetic construct
  source 1..23: mol_type = other RNA
accaccacagaaaccctcgtttt

SEQ ID NO: 162 - RNA, 23 nt, synthetic construct
  source 1..23: mol_type = other RNA
aagaatggttccaccacagaaac

SEQ ID NO: 163 - RNA, 23 nt, synthetic construct
  source 1..23: mol_type = other RNA
aagaactcgctcagaatggttcc

SEQ ID NO: 164 - RNA, 23 nt, synthetic construct
  source 1..23: mol_type = other RNA
attaggatgtagaactcgctcag

SEQ ID NO: 165 - RNA, 23 nt, synthetic construct
  source 1..23: mol_type = other RNA
agggctgccgttaggatgtagaa

SEQ ID NO: 166 - RNA, 23 nt, synthetic construct
  source 1..23: mol_type = other RNA
aagagacagtgggctgccgttag

SEQ ID NO: 167 - RNA, 23 nt, synthetic construct
  source 1..23: mol_type = other RNA
atggcttggtagagacagtgggc

SEQ ID NO: 168 - RNA, 23 nt, synthetic construct
  source 1..23: mol_type = other RNA
attgaatctcttggcttggtaga

SEQ ID NO: 169 - RNA, 23 nt, synthetic construct
  source 1..23: mol_type = other RNA
ataccctcaccttgaatctcttg

SEQ ID NO: 170 - RNA, 23 nt, synthetic construct
  source 1..23: mol_type = other RNA
attgatgaccacctccacctcgt

SEQ ID NO: 171 - RNA, 23 nt, synthetic construct
  source 1..23: mol_type = other RNA
acggttgtgcttgatgaccacct

SEQ ID NO: 172 - RNA, 23 nt, synthetic construct
  source 1..23: mol_type = other RNA
atttgtgaaccggttgtgcttga

SEQ ID NO: 173 - RNA, 23 nt, synthetic construct
  source 1..23: mol_type = other RNA
aaagtcataggtctcctttgtga

SEQ ID NO: 174 - RNA, 23 nt, synthetic construct
  source 1..23: mol_type = other RNA
agcgatgtcgaagtcataggtct

SEQ ID NO: 175 - RNA, 23 nt, synthetic construct
  source 1..23: mol_type = other RNA
acggagcacggcgatgtcgaagt

SEQ ID NO: 176 - RNA, 23 nt, synthetic construct
  source 1..23: mol_type = other RNA
aacgttcatgcggaaggtgatgg

SEQ ID NO: 177 - RNA, 23 nt, synthetic construct
  source 1..23: mol_type = other RNA
aatcagcgtggactcggcccagt

SEQ ID NO: 178 - RNA, 23 nt, synthetic construct
  source 1..23: mol_type = other RNA
agtcttctgcgtcatcagcgtgg

SEQ ID NO: 179 - RNA, 23 nt, synthetic construct
  source 1..23: mol_type = other RNA
aatcttgagcctggtggactgcc

SEQ ID NO: 180 - RNA, 23 nt, synthetic construct
  source 1..23: mol_type = other RNA
aacctccagcatcttgagcctgg

SEQ ID NO: 181 - RNA, 23 nt, synthetic construct
  source 1..23: mol_type = other RNA
atccacgtagggcacctccagca

SEQ ID NO: 182 - RNA, 23 nt, synthetic construct
  source 1..23: mol_type = other RNA
aagctgttgcggtccacgtaggg

SEQ ID NO: 183 - RNA, 23 nt, synthetic construct
  source 1..23: mol_type = other RNA
aacagcttgcagctgttgcggtc

SEQ ID NO: 184 - RNA, 23 nt, synthetic construct
  source 1..23: mol_type = other RNA
aagctgctggacagcttgcagct

SEQ ID NO: 185 - RNA, 23 nt, synthetic construct
  source 1..23: mol_type = other RNA
atgatgatgaagctgctggacag

SEQ ID NO: 186 - RNA, 23 nt, synthetic construct
  source 1..23: mol_type = other RNA
aagaacatgttctgggtgatgat

SEQ ID NO: 187 - RNA, 23 nt, synthetic construct
  source 1..23: mol_type = other RNA
aagccggcacagaacatgttctg

SEQ ID NO: 188 - RNA, 23 nt, synthetic construct
  source 1..23: mol_type = other RNA
actgcttggtgtcgtagccggca

SEQ ID NO: 189 - RNA, 23 nt, synthetic construct
  source 1..23: mol_type = other RNA
aaggcatcctcctgcttggtgtc

SEQ ID NO: 190 - RNA, 23 nt, synthetic construct
  source 1..23: mol_type = other RNA
aagtaggtgtccttgaagcgggt

SEQ ID NO: 191 - RNA, 23 nt, synthetic construct
  source 1..23: mol_type = other RNA
actgtcacgaagtaggtgtcctt

SEQ ID NO: 192 - RNA, 23 nt, synthetic construct
  source 1..23: mol_type = other RNA
aagctgacgatgcctgtcacgaa

SEQ ID NO: 193 - RNA, 23 nt, synthetic construct
  source 1..23: mol_type = other RNA
aaccttggtgtagatcccgtact

SEQ ID NO: 194 - RNA, 23 nt, synthetic construct
  source 1..23: mol_type = other RNA
aaaggcggtgaccttggtgtaga

SEQ ID NO: 195 - RNA, 23 nt, synthetic construct
  source 1..23: mol_type = other RNA
acgatccacttgaggaaggcggt

SEQ ID NO: 196 - RNA, 23 nt, synthetic construct
  source 1..23: mol_type = other RNA
atggacctgtcgatccacttgag

SEQ ID NO: 197 - RNA, 23 nt, synthetic construct
  source 1..23: mol_type = other RNA
atggttttcatggacctgtcgat

SEQ ID NO: 198 - RNA, 23 nt, synthetic construct
  source 1..23: mol_type = other RNA
atggctcttggccttgggcaagc

SEQ ID NO: 199 - RNA, 23 nt, synthetic construct
  source 1..23: mol_type = other RNA
ataatggagaggacgttatgacc

SEQ ID NO: 200 - RNA, 23 nt, synthetic construct
  source 1..23: mol_type = other RNA
aatctcactttaatggagaggac

SEQ ID NO: 201 - RNA, 21 nt, synthetic construct
  source 1..21: mol_type = other RNA
  modified_base 1: mod_base = OTHER; note = 2'-O-methylcytidine-3'-phosphorothioate
  modified_base 2: mod_base = OTHER; note = 2'-O-methyluridine-3'-phosphorothioate
  modified_base 3: mod_base = OTHER; note = 2'-O-methylcytidine-3'-phosphate
  modified_base 4: mod_base = OTHER; note = 2'-O-methylcytidine-3'-phosphate
  modified_base 5: mod_base = OTHER; note = 2'-O-methyladenosine-3'-phosphate
  modified_base 6: mod_base = OTHER; note = 2'-O-methylguanosine-3'-phosphate
  modified_base 7: mod_base = OTHER; note = 2'-deoxy-2'-fluorocytidine-3'-phosphate
  modified_base 8: mod_base = OTHER; note = 2'-O-methyladenosine-3'-phosphate
  modified_base 9: mod_base = OTHER; note = 2'-deoxy-2'-fluoroguanosine-3'-phosphate
  modified_base 10: mod_base = OTHER; note = 2'-deoxy-2'-fluorocytidine-3'-phosphate
  modified_base 11: mod_base = OTHER; note = 2'-deoxy-2'-fluorocytidine-3'-phosphate
  modified_base 12: mod_base = OTHER; note = 2'-O-methyluridine-3'-phosphate
  modified_base 13: mod_base = OTHER; note = 2'-O-methylguanosine-3'-phosphate
  modified_base 14: mod_base = OTHER; note = 2'-O-methyluridine-3'-phosphate
  modified_base 15: mod_base = OTHER; note = 2'-O-methylcytidine-3'-phosphate
  modified_base 16: mod_base = OTHER; note = 2'-O-methylcytidine-3'-phosphate
  modified_base 17: mod_base = OTHER; note = 2'-O-methylcytidine-3'-phosphate
  modified_base 18: mod_base = OTHER; note = 2'-O-methyladenosine-3'-phosphate
  modified_base 19: mod_base = OTHER; note = 2'-O-methylguanosine-3'-phosphate
  modified_base 20: mod_base = OTHER; note = 2'-O-methyluridine-3'-phosphate
  modified_base 21: mod_base = OTHER; note = 2'-O-methyluridine-3'-phosphate ((2S,4R)-1-[29-[[2-(acetylamino)-2-deoxy-beta-D-galactopyra nosyl]oxy]-14,14-bis[[3-[[3-[[5-[[2-(acetylamino)-2-deoxy-b eta-D-galactopyranosyl]oxy]-1-oxopentyl]amino]propyl]amino] -3-oxopropoxy]methyl]-1,12,19,25-tetraoxo-16-oxa-13,20,24-t riazanonacos-1-yl]-4-hydroxy-2-pyrrolidinyl)methyl ester
ctccagcagcctgtcccagtt

SEQ ID NO: 202 - RNA, 21 nt, synthetic construct
  source 1..21: mol_type = other RNA
  modified_base 1: mod_base = OTHER; note = 2'-O-methyluridine-3'-phosphorothioate
  modified_base 2: mod_base = OTHER; note = 2'-O-methylguanosine-3'-phosphorothioate
  modified_base 3: mod_base = OTHER; note = 2'-O-methyluridine-3'-phosphate
  modified_base 4: mod_base = OTHER; note = 2'-O-methylcytidine-3'-phosphate
  modified_base 5: mod_base = OTHER; note = 2'-O-methylcytidine-3'-phosphate
  modified_base 6: mod_base = OTHER; note = 2'-O-methylcytidine-3'-phosphate
  modified_base 7: mod_base = OTHER; note = 2'-deoxy-2'-fluoroadenosine-3'-phosphate
  modified_base 8: mod_base = OTHER; note = 2'-O-methylguanosine-3'-phosphate
  modified_base 9: mod_base = OTHER; note = 2'-deoxy-2'-fluorouridine-3'-phosphate
  modified_base 10: mod_base = OTHER; note = 2'-deoxy-2'-fluoroguanosine-3'-phosphate
  modified_base 11: mod_base = OTHER; note = 2'-deoxy-2'-fluoroadenosine-3'-phosphate
  modified_base 12: mod_base = OTHER; note = 2'-O-methylguanosine-3'-phosphate
  modified_base 13: mod_base = OTHER; note = 2'-O-methylguanosine-3'-phosphate
  modified_base 14: mod_base = OTHER; note = 2'-O-methyladenosine-3'-phosphate
  modified_base 15: mod_base = OTHER; note = 2'-O-methylcytidine-3'-phosphate
  modified_base 16: mod_base = OTHER; note = 2'-O-methyladenosine-3'-phosphate
  modified_base 17: mod_base = OTHER; note = 2'-O-methylguanosine-3'-phosphate
  modified_base 18: mod_base = OTHER; note = 2'-O-methylguanosine-3'-phosphate
  modified_base 19: mod_base = OTHER; note = 2'-O-methylguanosine-3'-phosphate
  modified_base 20: mod_base = OTHER; note = 2'-O-methyladenosine-3'-phosphate
  modified_base 21: mod_base = OTHER; note = 2'-O-methyluridine-3'-phosphate ((2S,4R)-1-[29-[[2-(acetylamino)-2-deoxy-beta-D-galactopyra nosyl]oxy]-14,14-bis[[3-[[3-[[5-[[2-(acetylamino)-2-deoxy-b eta-D-galactopyranosyl]oxy]-1-oxopentyl]amino]propyl]amino] -3-oxopropoxy]methyl]-1,12,19,25-tetraoxo-16-oxa-13,20,24-t riazanonacos-1-yl]-4-hydroxy-2-pyrrolidinyl)methyl ester
tgtcccagtgaggacagggat

SEQ ID NO: 203 - RNA, 21 nt, synthetic construct
  source 1..21: mol_type = other RNA
  modified_base 1: mod_base = OTHER; note = 2'-O-methyladenosine-3'-phosphorothioate
  modified_base 2: mod_base = OTHER; note = 2'-O-methylguanosine-3'-phosphorothioate
  modified_base 3: mod_base = OTHER; note = 2'-O-methylguanosine-3'-phosphate
  modified_base 4: mod_base = OTHER; note = 2'-O-methylguanosine-3'-phosphate
  modified_base 5: mod_base = OTHER; note = 2'-O-methyladenosine-3'-phosphate
  modified_base 6: mod_base = OTHER; note = 2'-O-methylcytidine-3'-phosphate
  modified_base 7: mod_base = OTHER; note = 2'-deoxy-2'-fluoroadenosine-3'-phosphate
  modified_base 8: mod_base = OTHER; note = 2'-O-methylcytidine-3'-phosphate
  modified_base 9: mod_base = OTHER; note = 2'-deoxy-2'-fluoroadenosine-3'-phosphate
  modified_base 10: mod_base = OTHER; note = 2'-deoxy-2'-fluoroguanosine-3'-phosphate
  modified_base 11: mod_base = OTHER; note = 2'-deoxy-2'-fluorouridine-3'-phosphate
  modified_base 12: mod_base = OTHER; note = 2'-O-methyladenosine-3'-phosphate
  modified_base 13: mod_base = OTHER; note = 2'-O-methylcytidine-3'-phosphate
  modified_base 14: mod_base = OTHER; note = 2'-O-methyluridine-3'-phosphate
  modified_base 15: mod_base = OTHER; note = 2'-O-methylcytidine-3'-phosphate
  modified_base 16: mod_base = OTHER; note = 2'-O-methylguanosine-3'-phosphate
  modified_base 17: mod_base = OTHER; note = 2'-O-methylguanosine-3'-phosphate
  modified_base 18: mod_base = OTHER; note = 2'-O-methylcytidine-3'-phosphate
  modified_base 19: mod_base = OTHER; note = 2'-O-methylcytidine-3'-phosphate
  modified_base 20: mod_base = OTHER; note = 2'-O-methyladenosine-3'-phosphate
  modified_base 21: mod_base = OTHER; note = 2'-O-methyluridine-3'-phosphate ((2S,4R)-1-[29-[[2-(acetylamino)-2-deoxy-beta-D-galactopyra nosyl]oxy]-14,14-bis[[3-[[3-[[5-[[2-(acetylamino)-2-deoxy-b eta-D-galactopyranosyl]oxy]-1-oxopentyl]amino]propyl]amino] -3-oxopropoxy]methyl]-1,12,19,25-tetraoxo-16-oxa-13,20,24-t riazanonacos-1-yl]-4-hydroxy-2-pyrrolidinyl)methyl ester
agggacacagtactcggccat

SEQ ID NO: 204 - RNA, 21 nt, synthetic construct
  source 1..21: mol_type = other RNA
  modified_base 1: mod_base = OTHER; note = 2'-O-methylcytidine-3'-phosphorothioate
  modified_base 2: mod_base = OTHER; note = 2'-O-methylcytidine-3'-phosphorothioate
  modified_base 3: mod_base = OTHER; note = 2'-O-methyluridine-3'-phosphate
  modified_base 4: mod_base = OTHER; note = 2'-O-methylcytidine-3'-phosphate
  modified_base 5: mod_base = OTHER; note = 2'-O-methylguanosine-3'-phosphate
  modified_base 6: mod_base = OTHER; note = 2'-O-methyluridine-3'-phosphate
  modified_base 7: mod_base = OTHER; note = 2'-deoxy-2'-fluorocytidine-3'-phosphate
  modified_base 8: mod_base = OTHER; note = 2'-O-methylcytidine-3'-phosphate
  modified_base 9: mod_base = OTHER; note = 2'-deoxy-2'-fluorouridine-3'-phosphate
  modified_base 10: mod_base = OTHER; note = 2'-deoxy-2'-fluoroguanosine-3'-phosphate
  modified_base 11: mod_base = OTHER; note = 2'-deoxy-2'-fluorocytidine-3'-phosphate
  modified_base 12: mod_base = OTHER; note = 2'-O-methyluridine-3'-phosphate
  modified_base 13: mod_base = OTHER; note = 2'-O-methylcytidine-3'-phosphate
  modified_base 14: mod_base = OTHER; note = 2'-O-methyladenosine-3'-phosphate
  modified_base 15: mod_base = OTHER; note = 2'-O-methylguanosine-3'-phosphate
  modified_base 16: mod_base = OTHER; note = 2'-O-methyluridine-3'-phosphate
  modified_base 17: mod_base = OTHER; note = 2'-O-methylguanosine-3'-phosphate
  modified_base 18: mod_base = OTHER; note = 2'-O-methylcytidine-3'-phosphate
  modified_base 19: mod_base = OTHER; note = 2'-O-methylcytidine-3'-phosphate
  modified_base 20: mod_base = OTHER; note = 2'-O-methyluridine-3'-phosphate
  modified_base 21: mod_base = OTHER; note = 2'-O-methyluridine-3'-phosphate ((2S,4R)-1-[29-[[2-(acetylamino)-2-deoxy-beta-D-galactopyra nosyl]oxy]-14,14-bis[[3-[[3-[[5-[[2-(acetylamino)-2-deoxy-b eta-D-galactopyranosyl]oxy]-1-oxopentyl]amino]propyl]amino] -3-oxopropoxy]methyl]-1,12,19,25-tetraoxo-16-oxa-13,20,24-t riazanonacos-1-yl]-4-hydroxy-2-pyrrolidinyl)methyl ester
cctcgtcctgctcagtgcctt

SEQ ID NO: 205 - RNA, 21 nt, synthetic construct
  source 1..21: mol_type = other RNA
  modified_base 1: mod_base = OTHER; note = 2'-O-methylguanosine-3'-phosphorothioate
  modified_base 2: mod_base = OTHER; note = 2'-O-methyladenosine-3'-phosphorothioate
  modified_base 3: mod_base = OTHER; note = 2'-O-methyladenosine-3'-phosphate
  modified_base 4: mod_base = OTHER; note = 2'-O-methyladenosine-3'-phosphate
  modified_base 5: mod_base = OTHER; note = 2'-O-methylguanosine-3'-phosphate
  modified_base 6: mod_base = OTHER; note = 2'-O-methyluridine-3'-phosphate
  modified_base 7: mod_base = OTHER; note = 2'-deoxy-2'-fluorocytidine-3'-phosphate
  modified_base 8: mod_base = OTHER; note = 2'-O-methyluridine-3'-phosphate
  modified_base 9: mod_base = OTHER; note = 2'-deoxy-2'-fluoroguanosine-3'-phosphate
  modified_base 10: mod_base = OTHER; note = 2'-deoxy-2'-fluorouridine-3'-phosphate
  modified_base 11: mod_base = OTHER; note = 2'-deoxy-2'-fluorouridine-3'-phosphate
  modified_base 12: mod_base = OTHER; note = 2'-O-methylcytidine-3'-phosphate
  modified_base 13: mod_base = OTHER; note = 2'-O-methyladenosine-3'-phosphate
  modified_base 14: mod_base = OTHER; note = 2'-O-methyluridine-3'-phosphate
  modified_base 15: mod_base = OTHER; note = 2'-O-methylcytidine-3'-phosphate
  modified_base 16: mod_base = OTHER; note = 2'-O-methylcytidine-3'-phosphate
  modified_base 17: mod_base = OTHER; note = 2'-O-methylguanosine-3'-phosphate
  modified_base 18: mod_base = OTHER; note = 2'-O-methylcytidine-3'-phosphate
  modified_base 19: mod_base = OTHER; note = 2'-O-methyladenosine-3'-phosphate
  modified_base 20: mod_base = OTHER; note = 2'-O-methylguanosine-3'-phosphate
  modified_base 21: mod_base = OTHER; note = 2'-O-methyluridine-3'-phosphate ((2S,4R)-1-[29-[[2-(acetylamino)-2-deoxy-beta-D-galactopyra nosyl]oxy]-14,14-bis[[3-[[3-[[5-[[2-(acetylamino)-2-deoxy-b eta-D-galactopyranosyl]oxy]-1-oxopentyl]amino]propyl]amino] -3-oxopropoxy]methyl]-1,12,19,25-tetraoxo-16-oxa-13,20,24-t riazanonacos-1-yl]-4-hydroxy-2-pyrrolidinyl)methyl ester
gaaagtctgttcatccgcagt

SEQ ID NO: 206 - RNA, 21 nt, synthetic construct
  source 1..21: mol_type = other RNA
  modified_base 1: mod_base = OTHER; note = 2'-O-methylcytidine-3'-phosphorothioate
  modified_base 2: mod_base = OTHER; note = 2'-O-methylcytidine-3'-phosphorothioate
  modified_base 3: mod_base = OTHER; note = 2'-O-methylguanosine-3'-phosphate
  modified_base 4: mod_base = OTHER; note = 2'-O-methylcytidine-3'-phosphate
  modified_base 5: mod_base = OTHER; note = 2'-O-methyladenosine-3'-phosphate
  modified_base 6: mod_base = OTHER; note = 2'-O-methylguanosine-3'-phosphate
  modified_base 7: mod_base = OTHER; note = 2'-deoxy-2'-fluoroguanosine-3'-phosphate
  modified_base 8: mod_base = OTHER; note = 2'-O-methylguanosine-3'-phosphate
  modified_base 9: mod_base = OTHER; note = 2'-deoxy-2'-fluoroadenosine-3'-phosphate
  modified_base 10: mod_base = OTHER; note = 2'-deoxy-2'-fluoroguanosine-3'-phosphate
  modified_base 11: mod_base = OTHER; note = 2'-deoxy-2'-fluorocytidine-3'-phosphate
  modified_base 12: mod_base = OTHER; note = 2'-O-methyladenosine-3'-phosphate
  modified_base 13: mod_base = OTHER; note = 2'-O-methylguanosine-3'-phosphate
  modified_base 14: mod_base = OTHER; note = 2'-O-methylguanosine-3'-phosphate
  modified_base 15: mod_base = OTHER; note = 2'-O-methylcytidine-3'-phosphate
  modified_base 16: mod_base = OTHER; note = 2'-O-methylcytidine-3'-phosphate
  modified_base 17: mod_base = OTHER; note = 2'-O-methyladenosine-3'-phosphate
  modified_base 18: mod_base = OTHER; note = 2'-O-methyladenosine-3'-phosphate
  modified_base 19: mod_base = OTHER; note = 2'-O-methylcytidine-3'-phosphate
  modified_base 20: mod_base = OTHER; note = 2'-O-methyladenosine-3'-phosphate
  modified_base 21: mod_base = OTHER; note = 2'-O-methyluridine-3'-phosphate ((2S,4R)-1-[29-[[2-(acetylamino)-2-deoxy-beta-D-galactopyra nosyl]oxy]-14,14-bis[[3-[[3-[[5-[[2-(acetylamino)-2-deoxy-b eta-D-galactopyranosyl]oxy]-1-oxopentyl]amino]propyl]amino] -3-oxopropoxy]methyl]-1,12,19,25-tetraoxo-16-oxa-13,20,24-t riazanonacos-1-yl]-4-hydroxy-2-pyrrolidinyl)methyl ester
ccgcagggagcaggccaacat

SEQ ID NO: 207 - RNA, 21 nt, synthetic construct
  source 1..21: mol_type = other RNA
  modified_base 1: mod_base = OTHER; note = 2'-O-methylguanosine-3'-phosphorothioate
  modified_base 2: mod_base = OTHER; note = 2'-O-methylcytidine-3'-phosphorothioate
  modified_base 3: mod_base = OTHER; note = 2'-O-methyladenosine-3'-phosphate
  modified_base 4: mod_base = OTHER; note = 2'-O-methylguanosine-3'-phosphate
  modified_base 5: mod_base = OTHER; note = 2'-O-methylguanosine-3'-phosphate
  modified_base 6: mod_base = OTHER; note = 2'-O-methylcytidine-3'-phosphate
  modified_base 7: mod_base = OTHER; note = 2'-deoxy-2'-fluorocytidine-3'-phosphate
  modified_base 8: mod_base = OTHER; note = 2'-O-methyladenosine-3'-phosphate
  modified_base 9: mod_base = OTHER; note = 2'-deoxy-2'-fluoroadenosine-3'-phosphate
  modified_base 10: mod_base = OTHER; note = 2'-deoxy-2'-fluorocytidine-3'-phosphate
  modified_base 11: mod_base = OTHER; note = 2'-deoxy-2'-fluoroadenosine-3'-phosphate
  modified_base 12: mod_base = OTHER; note = 2'-O-methyladenosine-3'-phosphate
  modified_base 13: mod_base = OTHER; note = 2'-O-methylcytidine-3'-phosphate
  modified_base 14: mod_base = OTHER; note = 2'-O-methyladenosine-3'-phosphate
  modified_base 15: mod_base = OTHER; note = 2'-O-methyluridine-3'-phosphate
  modified_base 16: mod_base = OTHER; note = 2'-O-methylcytidine-3'-phosphate
  modified_base 17: mod_base = OTHER; note = 2'-O-methylcytidine-3'-phosphate
  modified_base 18: mod_base = OTHER; note = 2'-O-methyluridine-3'-phosphate
  modified_base 19: mod_base = OTHER; note = 2'-O-methylguanosine-3'-phosphate
  modified_base 20: mod_base = OTHER; note = 2'-O-methylguanosine-3'-phosphate
  modified_base 21: mod_base = OTHER; note = 2'-O-methyluridine-3'-phosphate ((2S,4R)-1-[29-[[2-(acetylamino)-2-deoxy-beta-D-galactopyra nosyl]oxy]-14,14-bis[[3-[[3-[[5-[[2-(acetylamino)-2-deoxy-b eta-D-galactopyranosyl]oxy]-1-oxopentyl]amino]propyl]amino] -3-oxopropoxy]methyl]-1,12,19,25-tetraoxo-16-oxa-13,20,24-t riazanonacos-1-yl]-4-hydroxy-2-pyrrolidinyl)methyl ester
gcaggccaacaacatcctggt

SEQ ID NO: 208 - RNA, 21 nt, synthetic construct
  source 1..21: mol_type = other RNA
  modified_base 1: mod_base = OTHER; note = 2'-O-methyladenosine-3'-phosphorothioate
  modified_base 2: mod_base = OTHER; note = 2'-O-methyluridine-3'-phosphorothioate
  modified_base 3: mod_base = OTHER; note = 2'-O-methylcytidine-3'-phosphate
  modified_base 4: mod_base = OTHER; note = 2'-O-methylcytidine-3'-phosphate
  modified_base 5: mod_base = OTHER; note = 2'-O-methyluridine-3'-phosphate
  modified_base 6: mod_base = OTHER; note = 2'-O-methylguanosine-3'-phosphate
  modified_base 7: mod_base = OTHER; note = 2'-deoxy-2'-fluoroguanosine-3'-phosphate
  modified_base 8: mod_base = OTHER; note = 2'-O-methylcytidine-3'-phosphate
  modified_base 9: mod_base = OTHER; note = 2'-deoxy-2'-fluoroguanosine-3'-phosphate
  modified_base 10: mod_base = OTHER; note = 2'-deoxy-2'-fluoroadenosine-3'-phosphate
  modified_base 11: mod_base = OTHER; note = 2'-deoxy-2'-fluoroguanosine-3'-phosphate
  modified_base 12: mod_base = OTHER; note = 2'-O-methylguanosine-3'-phosphate
  modified_base 13: mod_base = OTHER; note = 2'-O-methylguanosine-3'-phosphate
  modified_base 14: mod_base = OTHER; note = 2'-O-methyluridine-3'-phosphate
  modified_base 15: mod_base = OTHER; note = 2'-O-methylcytidine-3'-phosphate
  modified_base 16: mod_base = OTHER; note = 2'-O-methyladenosine-3'-phosphate
  modified_base 17: mod_base = OTHER; note = 2'-O-methylcytidine-3'-phosphate
  modified_base 18: mod_base = OTHER; note = 2'-O-methylguanosine-3'-phosphate
  modified_base 19: mod_base = OTHER; note = 2'-O-methyladenosine-3'-phosphate
  modified_base 20: mod_base = OTHER; note = 2'-O-methylguanosine-3'-phosphate
  modified_base 21: mod_base = OTHER; note = 2'-O-methyluridine-3'-phosphate ((2S,4R)-1-[29-[[2-(acetylamino)-2-deoxy-beta-D-galactopyra nosyl]oxy]-14,14-bis[[3-[[3-[[5-[[2-(acetylamino)-2-deoxy-b eta-D-galactopyranosyl]oxy]-1-oxopentyl]amino]propyl]amino] -3-oxopropoxy]methyl]-1,12,19,25-tetraoxo-16-oxa-13,20,24-t riazanonacos-1-yl]-4-hydroxy-2-pyrrolidinyl)methyl ester
atcctggcgagggtcacgagt

SEQ ID NO: 209 - RNA, 21 nt, synthetic construct
  source 1..21: mol_type = other RNA
  modified_base 1: mod_base = OTHER; note = 2'-O-methyluridine-3'-phosphorothioate
  modified_base 2: mod_base = OTHER; note = 2'-O-methylcytidine-3'-phosphorothioate
  modified_base 3: mod_base = OTHER; note = 2'-O-methyladenosine-3'-phosphate
  modified_base 4: mod_base = OTHER; note = 2'-O-methylcytidine-3'-phosphate
  modified_base 5: mod_base = OTHER; note = 2'-O-methylguanosine-3'-phosphate
  modified_base 6: mod_base = OTHER; note = 2'-O-methyladenosine-3'-phosphate
  modified_base 7: mod_base = OTHER; note = 2'-deoxy-2'-fluoroguanosine-3'-phosphate
  modified_base 8: mod_base = OTHER; note = 2'-O-methylguanosine-3'-phosphate
  modified_base 9: mod_base = OTHER; note = 2'-deoxy-2'-fluoroguanosine-3'-phosphate
  modified_base 10: mod_base = OTHER; note = 2'-deoxy-2'-fluorocytidine-3'-phosphate
  modified_base 11: mod_base = OTHER; note = 2'-deoxy-2'-fluorocytidine-3'-phosphate
  modified_base 12: mod_base = OTHER; note = 2'-O-methyladenosine-3'-phosphate
  modified_base 13: mod_base = OTHER; note = 2'-O-methyladenosine-3'-phosphate
  modified_base 14: mod_base = OTHER; note = 2'-O-methyluridine-3'-phosphate
  modified_base 15: mod_base = OTHER; note = 2'-O-methyluridine-3'-phosphate
  modified_base 16: mod_base = OTHER; note = 2'-O-methylcytidine-3'-phosphate
  modified_base 17: mod_base = OTHER; note = 2'-O-methylcytidine-3'-phosphate
  modified_base 18: mod_base = OTHER; note = 2'-O-methyluridine-3'-phosphate
  modified_base 19: mod_base = OTHER; note = 2'-O-methyluridine-3'-phosphate
  modified_base 20: mod_base = OTHER; note = 2'-O-methyluridine-3'-phosphate
  modified_base 21: mod_base = OTHER; note = 2'-O-methyluridine-3'-phosphate ((2S,4R)-1-[29-[[2-(acetylamino)-2-deoxy-beta-D-galactopyra nosyl]oxy]-14,14-bis[[3-[[3-[[5-[[2-(acetylamino)-2-deoxy-b eta-D-galactopyranosyl]oxy]-1-oxopentyl]amino]propyl]amino] -3-oxopropoxy]methyl]-1,12,19,25-tetraoxo-16-oxa-13,20,24-t riazanonacos-1-yl]-4-hydroxy-2-pyrrolidinyl)methyl ester
tcacgagggccaattcctttt

SEQ ID NO: 210 - RNA, 21 nt, synthetic construct
  source 1..21: mol_type = other RNA
  modified_base 1: mod_base = OTHER; note = 2'-O-methylcytidine-3'-phosphorothioate
  modified_base 2: mod_base = OTHER; note = 2'-O-methylcytidine-3'-phosphorothioate
  modified_base 3: mod_base = OTHER; note = 2'-O-methyladenosine-3'-phosphate
  modified_base 4: mod_base = OTHER; note = 2'-O-methyladenosine-3'-phosphate
  modified_base 5: mod_base = OTHER; note = 2'-O-methyluridine-3'-phosphate
  modified_base 6: mod_base = OTHER; note = 2'-O-methyluridine-3'-phosphate
  modified_base 7: mod_base = OTHER; note = 2'-deoxy-2'-fluorocytidine-3'-phosphate
  modified_base 8: mod_base = OTHER; note = 2'-O-methylcytidine-3'-phosphate
  modified_base 9: mod_base = OTHER; note = 2'-deoxy-2'-fluorouridine-3'-phosphate
  modified_base 10: mod_base = OTHER; note = 2'-deoxy-2'-fluorouridine-3'-phosphate
  modified_base 11: mod_base = OTHER; note = 2'-deoxy-2'-fluorouridine-3'-phosphate
  modified_base 12: mod_base = OTHER; note = 2'-O-methylcytidine-3'-phosphate
  modified_base 13: mod_base = OTHER; note = 2'-O-methyluridine-3'-phosphate
  modified_base 14: mod_base = OTHER; note = 2'-O-methyluridine-3'-phosphate
  modified_base 15: mod_base = OTHER; note = 2'-O-methylguanosine-3'-phosphate
  modified_base 16: mod_base = OTHER; note = 2'-O-methyladenosine-3'-phosphate
  modified_base 17: mod_base = OTHER; note = 2'-O-methyladenosine-3'-phosphate
  modified_base 18: mod_base = OTHER; note = 2'-O-methylguanosine-3'-phosphate
  modified_base 19: mod_base = OTHER; note = 2'-O-methyladenosine-3'-phosphate
  modified_base 20: mod_base = OTHER; note = 2'-O-methylguanosine-3'-phosphate
  modified_base 21: mod_base = OTHER; note = 2'-O-methyluridine-3'-phosphate ((2S,4R)-1-[29-[[2-(acetylamino)-2-deoxy-beta-D-galactopyra nosyl]oxy]-14,14-bis[[3-[[3-[[5-[[2-(acetylamino)-2-deoxy-b eta-D-galactopyranosyl]oxy]-1-oxopentyl]amino]propyl]amino] -3-oxopropoxy]methyl]-1,12,19,25-tetraoxo-16-oxa-13,20,24-t riazanonacos-1-yl]-4-hydroxy-2-pyrrolidinyl)methyl ester
ccaattcctttcttgaagagt

SEQ ID NO: 211 - RNA, 21 nt, synthetic construct
  source 1..21: mol_type = other RNA
  modified_base 1: mod_base = OTHER; note = 2'-O-methyluridine-3'-phosphorothioate
  modified_base 2: mod_base = OTHER; note = 2'-O-methyluridine-3'-phosphorothioate
  modified_base 3: mod_base = OTHER; note = 2'-O-methylcytidine-3'-phosphate
  modified_base 4: mod_base = OTHER; note = 2'-O-methyluridine-3'-phosphate
  modified_base 5: mod_base = OTHER; note = 2'-O-methyluridine-3'-phosphate
  modified_base 6: mod_base = OTHER; note = 2'-O-methylguanosine-3'-phosphate
  modified_base 7: mod_base = OTHER; note = 2'-deoxy-2'-fluoroadenosine-3'-phosphate
  modified_base 8: mod_base = OTHER; note = 2'-O-methyladenosine-3'-phosphate
  modified_base 9: mod_base = OTHER; note = 2'-deoxy-2'-fluoroguanosine-3'-phosphate
  modified_base 10: mod_base = OTHER; note = 2'-deoxy-2'-fluoroadenosine-3'-phosphate
  modified_base 11: mod_base = OTHER; note = 2'-deoxy-2'-fluoroguanosine-3'-phosphate
  modified_base 12: mod_base = OTHER; note = 2'-O-methyladenosine-3'-phosphate
  modified_base 13: mod_base = OTHER; note = 2'-O-methyluridine-3'-phosphate
  modified_base 14: mod_base = OTHER; note = 2'-O-methylguanosine-3'-phosphate
  modified_base 15: mod_base = OTHER; note = 2'-O-methyladenosine-3'-phosphate
  modified_base 16: mod_base = OTHER; note = 2'-O-methyladenosine-3'-phosphate
  modified_base 17: mod_base = OTHER; note = 2'-O-methylguanosine-3'-phosphate
  modified_base 18: mod_base = OTHER; note = 2'-O-methyladenosine-3'-phosphate
  modified_base 19: mod_base = OTHER; note = 2'-O-methyladenosine-3'-phosphate
  modified_base 20: mod_base = OTHER; note = 2'-O-methyladenosine-3'-phosphate
  modified_base 21: mod_base = OTHER; note = 2'-O-methyluridine-3'-phosphate ((2S,4R)-1-[29-[[2-(acetylamino)-2-deoxy-beta-D-galactopyra nosyl]oxy]-14,14-bis[[3-[[3-[[5-[[2-(acetylamino)-2-deoxy-b eta-D-galactopyranosyl]oxy]-1-oxopentyl]amino]propyl]amino] -3-oxopropoxy]methyl]-1,12,19,25-tetraoxo-16-oxa-13,20,24-t riazanonacos-1-yl]-4-hydroxy-2-pyrrolidinyl)methyl ester
ttcttgaagagatgaagaaat

SEQ ID NO: 212 - RNA, 21 nt, synthetic construct
  source 1..21: mol_type = other RNA
  modified_base 1: mod_base = OTHER; note = 2'-O-methyladenosine-3'-phosphorothioate
  modified_base 2: mod_base = OTHER; note = 2'-O-methylguanosine-3'-phosphorothioate
  modified_base 3: mod_base = OTHER; note = 2'-O-methyladenosine-3'-phosphate
  modified_base 4: mod_base = OTHER; note = 2'-O-methyladenosine-3'-phosphate
  modified_base 5: mod_base = OTHER; note = 2'-O-methyladenosine-3'-phosphate
  modified_base 6: mod_base = OTHER; note = 2'-O-methylguanosine-3'-phosphate
  modified_base 7: mod_base = OTHER; note = 2'-deoxy-2'-fluoroguanosine-3'-phosphate
  modified_base 8: mod_base = OTHER; note = 2'-O-methyladenosine-3'-phosphate
  modified_base 9: mod_base = OTHER; note = 2'-deoxy-2'-fluorocytidine-3'-phosphate
  modified_base 10: mod_base = OTHER; note = 2'-deoxy-2'-fluoroadenosine-3'-phosphate
  modified_base 11: mod_base = OTHER; note = 2'-deoxy-2'-fluorocytidine-3'-phosphate
  modified_base 12: mod_base = OTHER; note = 2'-O-methylcytidine-3'-phosphate
  modified_base 13: mod_base = OTHER; note = 2'-O-methyluridine-3'-phosphate
  modified_base 14: mod_base = OTHER; note = 2'-O-methylcytidine-3'-phosphate
  modified_base 15: mod_base = OTHER; note = 2'-O-methylguanosine-3'-phosphate
  modified_base 16: mod_base = OTHER; note = 2'-O-methyladenosine-3'-phosphate
  modified_base 17: mod_base = OTHER; note = 2'-O-methyladenosine-3'-phosphate
  modified_base 18: mod_base = OTHER; note = 2'-O-methyladenosine-3'-phosphate
  modified_base 19: mod_base = OTHER; note = 2'-O-methylguanosine-3'-phosphate
  modified_base 20: mod_base = OTHER; note = 2'-O-methyladenosine-3'-phosphate
  modified_base 21: mod_base = OTHER; note = 2'-O-methyluridine-3'-phosphate ((2S,4R)-1-[29-[[2-(acetylamino)-2-deoxy-beta-D-galactopyra nosyl]oxy]-14,14-bis[[3-[[3-[[5-[[2-(acetylamino)-2-deoxy-b eta-D-galactopyranosyl]oxy]-1-oxopentyl]amino]propyl]amino] -3-oxopropoxy]methyl]-1,12,19,25-tetraoxo-16-oxa-13,20,24-t riazanonacos-1-yl]-4-hydroxy-2-pyrrolidinyl)methyl ester
agaaaggacacctcgaaagat

SEQ ID NO: 213 - RNA, 21 nt, synthetic construct
  source 1..21: mol_type = other RNA
  modified_base 1: mod_base = OTHER; note = 2'-O-methyladenosine-3'-phosphorothioate
  modified_base 2: mod_base = OTHER; note = 2'-O-methylcytidine-3'-phosphorothioate
  modified_base 3: mod_base = OTHER; note = 2'-O-methylcytidine-3'-phosphate
  modified_base 4: mod_base = OTHER; note = 2'-O-methyluridine-3'-phosphate
  modified_base 5: mod_base = OTHER; note = 2'-O-methylcytidine-3'-phosphate
  modified_base 6: mod_base = OTHER; note = 2'-O-methylguanosine-3'-phosphate
  modified_base 7: mod_base = OTHER; note = 2'-deoxy-2'-fluoroadenosine-3'-phosphate
  modified_base 8: mod_base = OTHER; note = 2'-O-methyladenosine-3'-phosphate
  modified_base 9: mod_base = OTHER; note = 2'-deoxy-2'-fluoroadenosine-3'-phosphate
  modified_base 10: mod_base = OTHER; note = 2'-deoxy-2'-fluoroguanosine-3'-phosphate
  modified_base 11: mod_base = OTHER; note = 2'-deoxy-2'-fluoroadenosine-3'-phosphate
  modified_base 12: mod_base = OTHER; note = 2'-O-methylguanosine-3'-phosphate
  modified_base 13: mod_base = OTHER; note = 2'-O-methyladenosine-3'-phosphate
  modified_base 14: mod_base = OTHER; note = 2'-O-methylguanosine-3'-phosphate
  modified_base 15: mod_base = OTHER; note = 2'-O-methyluridine-3'-phosphate
  modified_base 16: mod_base = OTHER; note = 2'-O-methylguanosine-3'-phosphate
  modified_base 17: mod_base = OTHER; note = 2'-O-methylcytidine-3'-phosphate
  modified_base 18: mod_base = OTHER; note = 2'-O-methyladenosine-3'-phosphate
  modified_base 19: mod_base = OTHER; note = 2'-O-methyluridine-3'-phosphate
  modified_base 20: mod_base = OTHER; note = 2'-O-methylguanosine-3'-phosphate
  modified_base 21: mod_base = OTHER; note = 2'-O-methyluridine-3'-phosphate ((2S,4R)-1-[29-[[2-(acetylamino)-2-deoxy-beta-D-galactopyra nosyl]oxy]-14,14-bis[[3-[[3-[[5-[[2-(acetylamino)-2-deoxy-b eta-D-galactopyranosyl]oxy]-1-oxopentyl]amino]propyl]amino] -3-oxopropoxy]methyl]-1,12,19,25-tetraoxo-16-oxa-13,20,24-t riazanonacos-1-yl]-4-hydroxy-2-pyrrolidinyl)methyl ester
acctcgaaagagagtgcatgt

SEQ ID NO: 214 - RNA, 21 nt, synthetic construct
  source 1..21: mol_type = other RNA
  modified_base 1: mod_base = OTHER; note = 2'-O-methylguanosine-3'-phosphorothioate
  modified_base 2: mod_base = OTHER; note = 2'-O-methyluridine-3'-phosphorothioate
  modified_base 3: mod_base = OTHER; note = 2'-O-methylguanosine-3'-phosphate
  modified_base 4: mod_base = OTHER; note = 2'-O-methylcytidine-3'-phosphate
  modified_base 5: mod_base = OTHER; note = 2'-O-methyladenosine-3'-phosphate
  modified_base 6: mod_base = OTHER; note = 2'-O-methyluridine-3'-phosphate
  modified_base 7: mod_base = OTHER; note = 2'-deoxy-2'-fluoroguanosine-3'-phosphate
  modified_base 8: mod_base = OTHER; note = 2'-O-methylguanosine-3'-phosphate
  modified_base 9: mod_base = OTHER; note = 2'-deoxy-2'-fluoroadenosine-3'-phosphate
  modified_base 10: mod_base = OTHER; note = 2'-deoxy-2'-fluoroadenosine-3'-phosphate
  modified_base 11: mod_base = OTHER; note = 2'-deoxy-2'-fluoroguanosine-3'-phosphate
  modified_base 12: mod_base = OTHER; note = 2'-O-methyladenosine-3'-phosphate
  modified_base 13: mod_base = OTHER; note = 2'-O-methylguanosine-3'-phosphate
  modified_base 14: mod_base = OTHER; note = 2'-O-methyladenosine-3'-phosphate
  modified_base 15: mod_base = OTHER; note = 2'-O-methylcytidine-3'-phosphate
  modified_base 16: mod_base = OTHER; note = 2'-O-methylcytidine-3'-phosphate
  modified_base 17: mod_base = OTHER; note = 2'-O-methyluridine-3'-phosphate
  modified_base 18: mod_base = OTHER; note = 2'-O-methylguanosine-3'-phosphate
  modified_base 19: mod_base = OTHER; note = 2'-O-methylcytidine-3'-phosphate
  modified_base 20: mod_base = OTHER; note = 2'-O-methyluridine-3'-phosphate
  modified_base 21: mod_base = OTHER; note = 2'-O-methyluridine-3'-phosphate ((2S,4R)-1-[29-[[2-(acetylamino)-2-deoxy-beta-D-galactopyra nosyl]oxy]-14,14-bis[[3-[[3-[[5-[[2-(acetylamino)-2-deoxy-b eta-D-galactopyranosyl]oxy]-1-oxopentyl]amino]propyl]amino] -3-oxopropoxy]methyl]-1,12,19,25-tetraoxo-16-oxa-13,20,24-t riazanonacos-1-yl]-4-hydroxy-2-pyrrolidinyl)methyl ester
gtgcatggaagagacctgctt

SEQ ID NO: 215 - RNA, 21 nt, synthetic construct
  source 1..21: mol_type = other RNA
  modified_base 1: mod_base = OTHER; note = 2'-O-methylguanosine-3'-phosphorothioate
  modified_base 2: mod_base = OTHER; note = 2'-O-methyladenosine-3'-phosphorothioate
  modified_base 3: mod_base = OTHER; note = 2'-O-methylcytidine-3'-phosphate
  modified_base 4: mod_base = OTHER; note = 2'-O-methylcytidine-3'-phosphate
  modified_base 5: mod_base = OTHER; note = 2'-O-methyluridine-3'-phosphate
  modified_base 6: mod_base = OTHER; note = 2'-O-methylguanosine-3'-phosphate
  modified_base 7: mod_base = OTHER; note = 2'-deoxy-2'-fluorocytidine-3'-phosphate
  modified_base 8: mod_base = OTHER; note = 2'-O-methyluridine-3'-phosphate
  modified_base 9: mod_base = OTHER; note = 2'-deoxy-2'-fluorocytidine-3'-phosphate
  modified_base 10: mod_base = OTHER; note = 2'-deoxy-2'-fluoroadenosine-3'-phosphate
  modified_base 11: mod_base = OTHER; note = 2'-deoxy-2'-fluorouridine-3'-phosphate
  modified_base 12: mod_base = OTHER; note = 2'-O-methyladenosine-3'-phosphate
  modified_base 13: mod_base = OTHER; note = 2'-O-methylcytidine-3'-phosphate
  modified_base 14: mod_base = OTHER; note = 2'-O-methylguanosine-3'-phosphate
  modified_base 15: mod_base = OTHER; note = 2'-O-methyladenosine-3'-phosphate
  modified_base 16: mod_base = OTHER; note = 2'-O-methyladenosine-3'-phosphate
  modified_base 17: mod_base = OTHER; note = 2'-O-methylguanosine-3'-phosphate
  modified_base 18: mod_base = OTHER; note = 2'-O-methyladenosine-3'-phosphate
  modified_base 19: mod_base = OTHER; note = 2'-O-methylguanosine-3'-phosphate
  modified_base 20: mod_base = OTHER; note = 2'-O-methylguanosine-3'-phosphate
  modified_base 21: mod_base = OTHER; note = 2'-O-methyluridine-3'-phosphate ((2S,4R)-1-[29-[[2-(acetylamino)-2-deoxy-beta-D-galactopyra nosyl]oxy]-14,14-bis[[3-[[3-[[5-[[2-(acetylamino)-2-deoxy-b eta-D-galactopyranosyl]oxy]-1-oxopentyl]amino]propyl]amino] -3-oxopropoxy]methyl]-1,12,19,25-tetraoxo-16-oxa-13,20,24-t riazanonacos-1-yl]-4-hydroxy-2-pyrrolidinyl)methyl ester
gacctgctcatacgaagaggt

SEQ ID NO: 216 - RNA, 21 nt, synthetic construct
  source 1..21: mol_type = other RNA
  modified_base 1: mod_base = OTHER; note = 2'-O-methylguanosine-3'-phosphorothioate
  modified_base 2: mod_base = OTHER; note = 2'-O-methyladenosine-3'-phosphorothioate
  modified_base 3: mod_base = OTHER; note = 2'-O-methyladenosine-3'-phosphate
  modified_base 4: mod_base = OTHER; note = 2'-O-methylguanosine-3'-phosphate
  modified_base 5: mod_base = OTHER; note = 2'-O-methyladenosine-3'-phosphate
  modified_base 6: mod_base = OTHER; note = 2'-O-methylguanosine-3'-phosphate
  modified_base 7: mod_base = OTHER; note = 2'-deoxy-2'-fluoroguanosine-3'-phosphate
  modified_base 8: mod_base = OTHER; note = 2'-O-methylcytidine-3'-phosphate
  modified_base 9: mod_base = OTHER; note = 2'-deoxy-2'-fluorocytidine-3'-phosphate
  modified_base 10: mod_base = OTHER; note = 2'-deoxy-2'-fluorocytidine-3'-phosphate
  modified_base 11: mod_base = OTHER; note = 2'-deoxy-2'-fluoroguanosine-3'-phosphate
  modified_base 12: mod_base = OTHER; note = 2'-O-methylcytidine-3'-phosphate
  modified_base 13: mod_base = OTHER; note = 2'-O-methylguanosine-3'-phosphate
  modified_base 14: mod_base = OTHER; note = 2'-O-methyladenosine-3'-phosphate
  modified_base 15: mod_base = OTHER; note = 2'-O-methylguanosine-3'-phosphate
  modified_base 16: mod_base = OTHER; note = 2'-O-methylguanosine-3'-phosphate
  modified_base 17: mod_base = OTHER; note = 2'-O-methyluridine-3'-phosphate
  modified_base 18: mod_base = OTHER; note = 2'-O-methylcytidine-3'-phosphate
  modified_base 19: mod_base = OTHER; note = 2'-O-methyluridine-3'-phosphate
  modified_base 20: mod_base = OTHER; note = 2'-O-methyluridine-3'-phosphate
  modified_base 21: mod_base = OTHER; note = 2'-O-methyluridine-3'-phosphate ((2S,4R)-1-[29-[[2-(acetylamino)-2-deoxy-beta-D-galactopyra nosyl]oxy]-14,14-bis[[3-[[3-[[5-[[2-(acetylamino)-2-deoxy-b eta-D-galactopyranosyl]oxy]-1-oxopentyl]amino]propyl]amino] -3-oxopropoxy]methyl]-1,12,19,25-tetraoxo-16-oxa-13,20,24-t riazanonacos-1-yl]-4-hydroxy-2-pyrrolidinyl)methyl ester
gaagaggcccgcgaggtcttt

SEQ ID NO: 217 - RNA, 21 nt, synthetic construct
  source 1..21: mol_type = other RNA
  modified_base 1: mod_base = OTHER; note = 2'-O-methylcytidine-3'-phosphorothioate
  modified_base 2: mod_base = OTHER; note = 2'-O-methylguanosine-3'-phosphorothioate
  modified_base 3: mod_base = OTHER; note = 2'-O-methylcytidine-3'-phosphate
  modified_base 4: mod_base = OTHER; note = 2'-O-methylguanosine-3'-phosphate
  modified_base 5: mod_base = OTHER; note = 2'-O-methyladenosine-3'-phosphate
  modified_base 6: mod_base = OTHER; note = 2'-O-methylguanosine-3'-phosphate
  modified_base 7: mod_base = OTHER; note = 2'-deoxy-2'-fluoroguanosine-3'-phosphate
  modified_base 8: mod_base = OTHER; note = 2'-O-methyluridine-3'-phosphate
  modified_base 9: mod_base = OTHER; note = 2'-deoxy-2'-fluorocytidine-3'-phosphate
  modified_base 10: mod_base = OTHER; note = 2'-deoxy-2'-fluorouridine-3'-phosphate
  modified_base 11: mod_base = OTHER; note = 2'-deoxy-2'-fluorouridine-3'-phosphate
  modified_base 12: mod_base = OTHER; note = 2'-O-methyluridine-3'-phosphate
  modified_base 13: mod_base = OTHER; note = 2'-O-methylguanosine-3'-phosphate
  modified_base 14: mod_base = OTHER; note = 2'-O-methyladenosine-3'-phosphate
  modified_base 15: mod_base = OTHER; note = 2'-O-methylguanosine-3'-phosphate
  modified_base 16: mod_base = OTHER; note = 2'-O-methylguanosine-3'-phosphate
  modified_base 17: mod_base = OTHER; note = 2'-O-methyladenosine-3'-phosphate
  modified_base 18: mod_base = OTHER; note = 2'-O-methylcytidine-3'-phosphate
  modified_base 19: mod_base = OTHER; note = 2'-O-methyladenosine-3'-phosphate
  modified_base 20: mod_base = OTHER; note = 2'-O-methylguanosine-3'-phosphate
  modified_base 21: mod_base = OTHER; note = 2'-O-methyluridine-3'-phosphate ((2S,4R)-1-[29-[[2-(acetylamino)-2-deoxy-beta-D-galactopyra nosyl]oxy]-14,14-bis[[3-[[3-[[5-[[2-(acetylamino)-2-deoxy-b eta-D-galactopyranosyl]oxy]-1-oxopentyl]amino]propyl]amino] -3-oxopropoxy]methyl]-1,12,19,25-tetraoxo-16-oxa-13,20,24-t riazanonacos-1-yl]-4-hydroxy-2-pyrrolidinyl)methyl ester
cgcgaggtctttgaggacagt

SEQ ID NO: 218 - RNA, 21 nt, synthetic construct
  source 1..21: mol_type = other RNA
  modified_base 1: mod_base = OTHER; note = 2'-O-methyluridine-3'-phosphorothioate
  modified_base 2: mod_base = OTHER; note = 2'-O-methylguanosine-3'-phosphorothioate
  modified_base 3: mod_base = OTHER; note = 2'-O-methyladenosine-3'-phosphate
  modified_base 4: mod_base = OTHER; note = 2'-O-methylguanosine-3'-phosphate
  modified_base 5: mod_base = OTHER; note = 2'-O-methylguanosine-3'-phosphate
  modified_base 6: mod_base = OTHER; note = 2'-O-methyladenosine-3'-phosphate
  modified_base 7: mod_base = OTHER; note = 2'-deoxy-2'-fluorocytidine-3'-phosphate
  modified_base 8: mod_base = OTHER; note = 2'-O-methyladenosine-3'-phosphate
  modified_base 9: mod_base = OTHER; note = 2'-deoxy-2'-fluoroguanosine-3'-phosphate
  modified_base 10: mod_base = OTHER; note = 2'-deoxy-2'-fluorocytidine-3'-phosphate
  modified_base 11: mod_base = OTHER; note = 2'-deoxy-2'-fluoroguanosine-3'-phosphate
  modified_base 12: mod_base = OTHER; note = 2'-O-methyladenosine-3'-phosphate
  modified_base 13: mod_base = OTHER; note = 2'-O-methylcytidine-3'-phosphate
  modified_base 14: mod_base = OTHER; note = 2'-O-methyladenosine-3'-phosphate
  modified_base 15: mod_base = OTHER; note = 2'-O-methyladenosine-3'-phosphate
  modified_base 16: mod_base = OTHER; note = 2'-O-methylguanosine-3'-phosphate
  modified_base 17: mod_base = OTHER; note = 2'-O-methyladenosine-3'-phosphate
  modified_base 18: mod_base = OTHER; note = 2'-O-methylcytidine-3'-phosphate
  modified_base 19: mod_base = OTHER; note = 2'-O-methylguanosine-3'-phosphate
  modified_base 20: mod_base = OTHER; note = 2'-O-methyladenosine-3'-phosphate
  modified_base 21: mod_base = OTHER; note = 2'-O-methyluridine-3'-phosphate ((2S,4R)-1-[29-[[2-(acetylamino)-2-deoxy-beta-D-galactopyra nosyl]oxy]-14,14-bis[[3-[[3-[[5-[[2-(acetylamino)-2-deoxy-b eta-D-galactopyranosyl]oxy]-1-oxopentyl]amino]propyl]amino] -3-oxopropoxy]methyl]-1,12,19,25-tetraoxo-16-oxa-13,20,24-t riazanonacos-1-yl]-4-hydroxy-2-pyrrolidinyl)methyl ester
tgaggacagcgacaagacgat

SEQ ID NO: 219 - RNA, 21 nt, synthetic construct
  source 1..21: mol_type = other RNA
  modified_base 1: mod_base = OTHER; note = 2'-O-methylcytidine-3'-phosphorothioate
  modified_base 2: mod_base = OTHER; note = 2'-O-methylguanosine-3'-phosphorothioate
  modified_base 3: mod_base = OTHER; note = 2'-O-methyladenosine-3'-phosphate
  modified_base 4: mod_base = OTHER; note = 2'-O-methylcytidine-3'-phosphate
  modified_base 5: mod_base = OTHER; note = 2'-O-methyladenosine-3'-phosphate
  modified_base 6: mod_base = OTHER; note = 2'-O-methyladenosine-3'-phosphate
  modified_base 7: mod_base = OTHER; note = 2'-deoxy-2'-fluoroguanosine-3'-phosphate
  modified_base 8: mod_base = OTHER; note = 2'-O-methyladenosine-3'-phosphate
  modified_base 9: mod_base = OTHER; note = 2'-deoxy-2'-fluorocytidine-3'-phosphate
  modified_base 10: mod_base = OTHER; note = 2'-deoxy-2'-fluoroguanosine-3'-phosphate
  modified_base 11: mod_base = OTHER; note = 2'-deoxy-2'-fluoroadenosine-3'-phosphate
  modified_base 12: mod_base = OTHER; note = 2'-O-methyladenosine-3'-phosphate
  modified_base 13: mod_base = OTHER; note = 2'-O-methyluridine-3'-phosphate
  modified_base 14: mod_base = OTHER; note = 2'-O-methylguanosine-3'-phosphate
  modified_base 15: mod_base = OTHER; note = 2'-O-methyladenosine-3'-phosphate
  modified_base 16: mod_base = OTHER; note = 2'-O-methyladenosine-3'-phosphate
  modified_base 17: mod_base = OTHER; note = 2'-O-methyluridine-3'-phosphate
  modified_base 18: mod_base = OTHER; note = 2'-O-methyluridine-3'-phosphate
  modified_base 19: mod_base = OTHER; note = 2'-O-methylcytidine-3'-phosphate
  modified_base 20: mod_base = OTHER; note = 2'-O-methyluridine-3'-phosphate
  modified_base 21: mod_base = OTHER; note = 2'-O-methyluridine-3'-phosphate ((2S,4R)-1-[29-[[2-(acetylamino)-2-deoxy-beta-D-galactopyra nosyl]oxy]-14,14-bis[[3-[[3-[[5-[[2-(acetylamino)-2-deoxy-b eta-D-galactopyranosyl]oxy]-1-oxopentyl]amino]propyl]amino] -3-oxopropoxy]methyl]-1,12,19,25-tetraoxo-16-oxa-13,20,24-t riazanonacos-1-yl]-4-hydroxy-2-pyrrolidinyl)methyl ester
cgacaagacgaatgaattctt

SEQ ID NO: 220 - RNA, 21 nt, synthetic construct
  source 1..21: mol_type = other RNA
  modified_base 1: mod_base = OTHER; note = 2'-O-methylguanosine-3'-phosphorothioate
  modified_base 2: mod_base = OTHER; note = 2'-O-methyladenosine-3'-phosphorothioate
  modified_base 3: mod_base = OTHER; note = 2'-O-methyladenosine-3'-phosphate
  modified_base 4: mod_base = OTHER; note = 2'-O-methyluridine-3'-phosphate
  modified_base 5: mod_base = OTHER; note = 2'-O-methylguanosine-3'-phosphate
  modified_base 6: mod_base = OTHER; note = 2'-O-methyladenosine-3'-phosphate
  modified_base 7: mod_base = OTHER; note = 2'-deoxy-2'-fluoroadenosine-3'-phosphate
  modified_base 8: mod_base = OTHER; note = 2'-O-methyluridine-3'-phosphate
  modified_base 9: mod_base = OTHER; note = 2'-deoxy-2'-fluorouridine-3'-phosphate
  modified_base 10: mod_base = OTHER; note = 2'-deoxy-2'-fluorocytidine-3'-phosphate
  modified_base 11: mod_base = OTHER; note = 2'-deoxy-2'-fluorouridine-3'-phosphate
  modified_base 12: mod_base = OTHER; note = 2'-O-methylguanosine-3'-phosphate
  modified_base 13: mod_base = OTHER; note = 2'-O-methylguanosine-3'-phosphate
  modified_base 14: mod_base = OTHER; note = 2'-O-methyladenosine-3'-phosphate
  modified_base 15: mod_base = OTHER; note = 2'-O-methyladenosine-3'-phosphate
  modified_base 16: mod_base = OTHER; note = 2'-O-methyluridine-3'-phosphate
  modified_base 17: mod_base = OTHER; note = 2'-O-methyladenosine-3'-phosphate
  modified_base 18: mod_base = OTHER; note = 2'-O-methyladenosine-3'-phosphate
  modified_base 19: mod_base = OTHER; note = 2'-O-methyladenosine-3'-phosphate
  modified_base 20: mod_base = OTHER; note = 2'-O-methyluridine-3'-phosphate
  modified_base 21: mod_base = OTHER; note = 2'-O-methyluridine-3'-phosphate ((2S,4R)-1-[29-[[2-(acetylamino)-2-deoxy-beta-D-galactopyra nosyl]oxy]-14,14-bis[[3-[[3-[[5-[[2-(acetylamino)-2-deoxy-b eta-D-galactopyranosyl]oxy]-1-oxopentyl]amino]propyl]amino] -3-oxopropoxy]methyl]-1,12,19,25-tetraoxo-16-oxa-13,20,24-t riazanonacos-1-yl]-4-hydroxy-2-pyrrolidinyl)methyl ester
gaatgaattctggaataaatt

SEQ ID NO: 221 - RNA, 21 nt, synthetic construct
  source 1..21: mol_type = other RNA
  modified_base 1: mod_base = OTHER; note = 2'-O-methylcytidine-3'-phosphorothioate
  modified_base 2: mod_base = OTHER; note = 2'-O-methyluridine-3'-phosphorothioate
  modified_base 3: mod_base = OTHER; note = 2'-O-methylguanosine-3'-phosphate
  modified_base 4: mod_base = OTHER; note = 2'-O-methylguanosine-3'-phosphate
  modified_base 5: mod_base = OTHER; note = 2'-O-methyladenosine-3'-phosphate
  modified_base 6: mod_base = OTHER; note = 2'-O-methyladenosine-3'-phosphate
  modified_base 7: mod_base = OTHER; note = 2'-deoxy-2'-fluorouridine-3'-phosphate
  modified_base 8: mod_base = OTHER; note = 2'-O-methyladenosine-3'-phosphate
  modified_base 9: mod_base = OTHER; note = 2'-deoxy-2'-fluoroadenosine-3'-phosphate
  modified_base 10: mod_base = OTHER; note = 2'-deoxy-2'-fluoroadenosine-3'-phosphate
  modified_base 11: mod_base = OTHER; note = 2'-deoxy-2'-fluorouridine-3'-phosphate
  modified_base 12: mod_base = OTHER; note = 2'-O-methyladenosine-3'-phosphate
  modified_base 13: mod_base = OTHER; note = 2'-O-methylcytidine-3'-phosphate
  modified_base 14: mod_base = OTHER; note = 2'-O-methyladenosine-3'-phosphate
  modified_base 15: mod_base = OTHER; note = 2'-O-methyladenosine-3'-phosphate
  modified_base 16: mod_base = OTHER; note = 2'-O-methyladenosine-3'-phosphate
  modified_base 17: mod_base = OTHER; note = 2'-O-methylguanosine-3'-phosphate
  modified_base 18: mod_base = OTHER; note = 2'-O-methyladenosine-3'-phosphate
  modified_base 19: mod_base = OTHER; note = 2'-O-methyluridine-3'-phosphate
  modified_base 20: mod_base = OTHER; note = 2'-O-methylguanosine-3'-phosphate
  modified_base 21: mod_base = OTHER; note = 2'-O-methyluridine-3'-phosphate ((2S,4R)-1-[29-[[2-(acetylamino)-2-deoxy-beta-D-galactopyra nosyl]oxy]-14,14-bis[[3-[[3-[[5-[[2-(acetylamino)-2-deoxy-b eta-D-galactopyranosyl]oxy]-1-oxopentyl]amino]propyl]amino] -3-oxopropoxy]methyl]-1,12,19,25-tetraoxo-16-oxa-13,20,24-t riazanonacos-1-yl]-4-hydroxy-2-pyrrolidinyl)methyl ester
ctggaataaatacaaagatgt

SEQ ID NO: 222 - RNA, 21 nt, synthetic construct
  source 1..21: mol_type = other RNA
  modified_base 1: mod_base = OTHER; note = 2'-O-methyladenosine-3'-phosphorothioate
  modified_base 2: mod_base = OTHER; note = 2'-O-methylcytidine-3'-phosphorothioate
  modified_base 3: mod_base = OTHER; note = 2'-O-methyladenosine-3'-phosphate
  modified_base 4: mod_base = OTHER; note = 2'-O-methyladenosine-3'-phosphate
  modified_base 5: mod_base = OTHER; note = 2'-O-methyladenosine-3'-phosphate
  modified_base 6: mod_base = OTHER; note = 2'-O-methylguanosine-3'-phosphate
  modified_base 7: mod_base = OTHER; note = 2'-deoxy-2'-fluoroadenosine-3'-phosphate
  modified_base 8: mod_base = OTHER; note = 2'-O-methyluridine-3'-phosphate
  modified_base 9: mod_base = OTHER; note = 2'-deoxy-2'-fluoroguanosine-3'-phosphate
  modified_base 10: mod_base = OTHER; note = 2'-deoxy-2'-fluoroguanosine-3'-phosphate
  modified_base 11: mod_base = OTHER; note = 2'-deoxy-2'-fluorocytidine-3'-phosphate
  modified_base 12: mod_base = OTHER; note = 2'-O-methylguanosine-3'-phosphate
  modified_base 13: mod_base = OTHER; note = 2'-O-methyladenosine-3'-phosphate
  modified_base 14: mod_base = OTHER; note = 2'-O-methylcytidine-3'-phosphate
  modified_base 15: mod_base = OTHER; note = 2'-O-methylcytidine-3'-phosphate
  modified_base 16: mod_base = OTHER; note = 2'-O-methyladenosine-3'-phosphate
  modified_base 17: mod_base = OTHER; note = 2'-O-methylguanosine-3'-phosphate
  modified_base 18: mod_base = OTHER; note = 2'-O-methyluridine-3'-phosphate
  modified_base 19: mod_base = OTHER; note = 2'-O-methylguanosine-3'-phosphate
  modified_base 20: mod_base = OTHER; note = 2'-O-methyluridine-3'-phosphate
  modified_base 21: mod_base = OTHER; note = 2'-O-methyluridine-3'-phosphate ((2S,4R)-1-[29-[[2-(acetylamino)-2-deoxy-beta-D-galactopyra nosyl]oxy]-14,14-bis[[3-[[3-[[5-[[2-(acetylamino)-2-deoxy-b eta-D-galactopyranosyl]oxy]-1-oxopentyl]amino]propyl]amino] -3-oxopropoxy]methyl]-1,12,19,25-tetraoxo-16-oxa-13,20,24-t riazanonacos-1-yl]-4-hydroxy-2-pyrrolidinyl)methyl ester
acaaagatggcgaccagtgtt

SEQ ID NO: 223 - RNA, 21 nt, synthetic construct
  source 1..21: mol_type = other RNA
  modified_base 1: mod_base = OTHER; note = 2'-O-methylcytidine-3'-phosphorothioate
  modified_base 2: mod_base = OTHER; note = 2'-O-methylguanosine-3'-phosphorothioate
  modified_base 3: mod_base = OTHER; note = 2'-O-methyladenosine-3'-phosphate
  modified_base 4: mod_base = OTHER; note = 2'-O-methylcytidine-3'-phosphate
  modified_base 5: mod_base = OTHER; note = 2'-O-methylcytidine-3'-phosphate
  modified_base 6: mod_base = OTHER; note = 2'-O-methyladenosine-3'-phosphate
  modified_base 7: mod_base = OTHER; note = 2'-deoxy-2'-fluoroguanosine-3'-phosphate
  modified_base 8: mod_base = OTHER; note = 2'-O-methyluridine-3'-phosphate
  modified_base 9: mod_base = OTHER; note = 2'-deoxy-2'-fluoroguanosine-3'-phosphate
  modified_base 10: mod_base = OTHER; note = 2'-deoxy-2'-fluorouridine-3'-phosphate
  modified_base 11: mod_base = OTHER; note = 2'-deoxy-2'-fluoroguanosine-3'-phosphate
  modified_base 12: mod_base = OTHER; note = 2'-O-methyladenosine-3'-phosphate
  modified_base 13: mod_base = OTHER; note = 2'-O-methylguanosine-3'-phosphate
  modified_base 14: mod_base = OTHER; note = 2'-O-methyladenosine-3'-phosphate
  modified_base 15: mod_base = OTHER; note = 2'-O-methylcytidine-3'-phosphate
  modified_base 16: mod_base = OTHER; note = 2'-O-methylcytidine-3'-phosphate
  modified_base 17: mod_base = OTHER; note = 2'-O-methyladenosine-3'-phosphate
  modified_base 18: mod_base = OTHER; note = 2'-O-methylguanosine-3'-phosphate
  modified_base 19: mod_base = OTHER; note = 2'-O-methyluridine-3'-phosphate
  modified_base 20: mod_base = OTHER; note = 2'-O-methylcytidine-3'-phosphate
  modified_base 21: mod_base = OTHER; note = 2'-O-methyluridine-3'-phosphate ((2S,4R)-1-[29-[[2-(acetylamino)-2-deoxy-beta-D-galactopyra nosyl]oxy]-14,14-bis[[3-[[3-[[5-[[2-(acetylamino)-2-deoxy-b eta-D-galactopyranosyl]oxy]-1-oxopentyl]amino]propyl]amino] -3-oxopropoxy]methyl]-1,12,19,25-tetraoxo-16-oxa-13,20,24-t riazanonacos-1-yl]-4-hydroxy-2-pyrrolidinyl)methyl ester
cgaccagtgtgagaccagtct

SEQ ID NO: 224 - RNA, 21 nt, synthetic construct
  source 1..21: mol_type = other RNA
  modified_base 1: mod_base = OTHER; note = 2'-O-methyladenosine-3'-phosphorothioate
  modified_base 2: mod_base = OTHER; note = 2'-O-methylguanosine-3'-phosphorothioate
  modified_base 3: mod_base = OTHER; note = 2'-O-methyladenosine-3'-phosphate
  modified_base 4: mod_base = OTHER; note = 2'-O-methylcytidine-3'-phosphate
  modified_base 5: mod_base = OTHER; note = 2'-O-methylcytidine-3'-phosphate
  modified_base 6: mod_base = OTHER; note = 2'-O-methyladenosine-3'-phosphate
  modified_base 7: mod_base = OTHER; note = 2'-deoxy-2'-fluoroguanosine-3'-phosphate
  modified_base 8: mod_base = OTHER; note = 2'-O-methyluridine-3'-phosphate
  modified_base 9: mod_base = OTHER; note = 2'-deoxy-2'-fluorocytidine-3'-phosphate
  modified_base 10: mod_base = OTHER; note = 2'-deoxy-2'-fluorocytidine-3'-phosphate
  modified_base 11: mod_base = OTHER; note = 2'-deoxy-2'-fluorouridine-3'-phosphate
  modified_base 12: mod_base = OTHER; note = 2'-O-methyluridine-3'-phosphate
  modified_base 13: mod_base = OTHER; note = 2'-O-methylguanosine-3'-phosphate
  modified_base 14: mod_base = OTHER; note = 2'-O-methylcytidine-3'-phosphate
  modified_base 15: mod_base = OTHER; note = 2'-O-methylcytidine-3'-phosphate
  modified_base 16: mod_base = OTHER; note = 2'-O-methyladenosine-3'-phosphate
  modified_base 17: mod_base = OTHER; note = 2'-O-methylguanosine-3'-phosphate
  modified_base 18: mod_base = OTHER; note = 2'-O-methyladenosine-3'-phosphate
  modified_base 19: mod_base = OTHER; note = 2'-O-methyladenosine-3'-phosphate
  modified_base 20: mod_base = OTHER; note = 2'-O-methylcytidine-3'-phosphate
  modified_base 21: mod_base = OTHER; note = 2'-O-methyluridine-3'-phosphate ((2S,4R)-1-[29-[[2-(acetylamino)-2-deoxy-beta-D-galactopyra nosyl]oxy]-14,14-bis[[3-[[3-[[5-[[2-(acetylamino)-2-deoxy-b eta-D-galactopyranosyl]oxy]-1-oxopentyl]amino]propyl]amino] -3-oxopropoxy]methyl]-1,12,19,25-tetraoxo-16-oxa-13,20,24-t riazanonacos-1-yl]-4-hydroxy-2-pyrrolidinyl)methyl ester
agaccagtccttgccagaact

SEQ ID NO: 225 - RNA, 21 nt, synthetic construct
  source 1..21: mol_type = other RNA
  modified_base 1: mod_base = OTHER; note = 2'-O-methyluridine-3'-phosphorothioate
  modified_base 2: mod_base = OTHER; note = 2'-O-methyluridine-3'-phosphorothioate
  modified_base 3: mod_base = OTHER; note = 2'-O-methylguanosine-3'-phosphate
  modified_base 4: mod_base = OTHER; note = 2'-O-methylcytidine-3'-phosphate
  modified_base 5: mod_base = OTHER; note = 2'-O-methylcytidine-3'-phosphate
  modified_base 6: mod_base = OTHER; note = 2'-O-methyladenosine-3'-phosphate
  modified_base 7: mod_base = OTHER; note = 2'-deoxy-2'-fluoroguanosine-3'-phosphate
  modified_base 8: mod_base = OTHER; note = 2'-O-methyladenosine-3'-phosphate
  modified_base 9: mod_base = OTHER; note = 2'-deoxy-2'-fluoroadenosine-3'-phosphate
  modified_base 10: mod_base = OTHER; note = 2'-deoxy-2'-fluorocytidine-3'-phosphate
  modified_base 11: mod_base = OTHER; note = 2'-deoxy-2'-fluorocytidine-3'-phosphate
  modified_base 12: mod_base = OTHER; note = 2'-O-methyladenosine-3'-phosphate
  modified_base 13: mod_base = OTHER; note = 2'-O-methylguanosine-3'-phosphate
  modified_base 14: mod_base = OTHER; note = 2'-O-methylguanosine-3'-phosphate
  modified_base 15: mod_base = OTHER; note = 2'-O-methylguanosine-3'-phosphate
  modified_base 16: mod_base = OTHER; note = 2'-O-methylcytidine-3'-phosphate
  modified_base 17: mod_base = OTHER; note = 2'-O-methyladenosine-3'-phosphate
  modified_base 18: mod_base = OTHER; note = 2'-O-methyladenosine-3'-phosphate
  modified_base 19: mod_base = OTHER; note = 2'-O-methyladenosine-3'-phosphate
  modified_base 20: mod_base = OTHER; note = 2'-O-methyluridine-3'-phosphate
  modified_base 21: mod_base = OTHER; note = 2'-O-methyluridine-3'-phosphate ((2S,4R)-1-[29-[[2-(acetylamino)-2-deoxy-beta-D-galactopyra nosyl]oxy]-14,14-bis[[3-[[3-[[5-[[2-(acetylamino)-2-deoxy-b eta-D-galactopyranosyl]oxy]-1-oxopentyl]amino]propyl]amino] -3-oxopropoxy]methyl]-1,12,19,25-tetraoxo-16-oxa-13,20,24-t riazanonacos-1-yl]-4-hydroxy-2-pyrrolidinyl)methyl ester
ttgccagaaccagggcaaatt

SEQ ID NO: 226 - RNA, 21 nt, synthetic construct
  source 1..21: mol_type = other RNA
  modified_base 1: mod_base = OTHER; note = 2'-O-methylcytidine-3'-phosphorothioate
  modified_base 2: mod_base = OTHER; note = 2'-O-methylcytidine-3'-phosphorothioate
  modified_base 3: mod_base = OTHER; note = 2'-O-methyladenosine-3'-phosphate
  modified_base 4: mod_base = OTHER; note = 2'-O-methylguanosine-3'-phosphate
  modified_base 5: mod_base = OTHER; note = 2'-O-methylguanosine-3'-phosphate
  modified_base 6: mod_base = OTHER; note = 2'-O-methylguanosine-3'-phosphate
  modified_base 7: mod_base = OTHER; note = 2'-deoxy-2'-fluorocytidine-3'-phosphate
  modified_base 8: mod_base = OTHER; note = 2'-O-methyladenosine-3'-phosphate
  modified_base 9: mod_base = OTHER; note = 2'-deoxy-2'-fluoroadenosine-3'-phosphate
  modified_base 10: mod_base = OTHER; note = 2'-deoxy-2'-fluoroadenosine-3'-phosphate
  modified_base 11: mod_base = OTHER; note = 2'-deoxy-2'-fluorouridine-3'-phosphate
  modified_base 12: mod_base = OTHER; note = 2'-O-methylguanosine-3'-phosphate
  modified_base 13: mod_base = OTHER; note = 2'-O-methyluridine-3'-phosphate
  modified_base 14: mod_base = OTHER; note = 2'-O-methyladenosine-3'-phosphate
  modified_base 15: mod_base = OTHER; note = 2'-O-methyladenosine-3'-phosphate
  modified_base 16: mod_base = OTHER; note = 2'-O-methyladenosine-3'-phosphate
  modified_base 17: mod_base = OTHER; note = 2'-O-methylguanosine-3'-phosphate
  modified_base 18: mod_base = OTHER; note = 2'-O-methyladenosine-3'-phosphate
  modified_base 19: mod_base = OTHER; note = 2'-O-methylcytidine-3'-phosphate
  modified_base 20: mod_base = OTHER; note = 2'-O-methylguanosine-3'-phosphate
  modified_base 21: mod_base = OTHER; note = 2'-O-methyluridine-3'-phosphate ((2S,4R)-1-[29-[[2-(acetylamino)-2-deoxy-beta-D-galactopyra nosyl]oxy]-14,14-bis[[3-[[3-[[5-[[2-(acetylamino)-2-deoxy-b eta-D-galactopyranosyl]oxy]-1-oxopentyl]amino]propyl]amino] -3-oxopropoxy]methyl]-1,12,19,25-tetraoxo-16-oxa-13,20,24-t riazanonacos-1-yl]-4-hydroxy-2-pyrrolidinyl)methyl ester
ccagggcaaatgtaaagacgt

SEQ ID NO: 227 - RNA, 21 nt, synthetic construct
  source 1..21: mol_type = other RNA
  modified_base 1: mod_base = OTHER; note = 2'-O-methyladenosine-3'-phosphorothioate
  modified_base 2: mod_base = OTHER; note = 2'-O-methylcytidine-3'-phosphorothioate
  modified_base 3: mod_base = OTHER; note = 2'-O-methyladenosine-3'-phosphate
  modified_base 4: mod_base = OTHER; note = 2'-O-methylcytidine-3'-phosphate
  modified_base 5: mod_base = OTHER; note = 2'-O-methylcytidine-3'-phosphate
  modified_base 6: mod_base = OTHER; note = 2'-O-methyluridine-3'-phosphate
  modified_base 7: mod_base = OTHER; note = 2'-deoxy-2'-fluoroguanosine-3'-phosphate
  modified_base 8: mod_base = OTHER; note = 2'-O-methylcytidine-3'-phosphate
  modified_base 9: mod_base = OTHER; note = 2'-deoxy-2'-fluoroadenosine-3'-phosphate
  modified_base 10: mod_base = OTHER; note = 2'-deoxy-2'-fluorocytidine-3'-phosphate
  modified_base 11: mod_base = OTHER; note = 2'-deoxy-2'-fluorocytidine-3'-phosphate
  modified_base 12: mod_base = OTHER; note = 2'-O-methyluridine-3'-phosphate
  modified_base 13: mod_base = OTHER; note = 2'-O-methylguanosine-3'-phosphate
  modified_base 14: mod_base = OTHER; note = 2'-O-methyluridine-3'-phosphate
  modified_base 15: mod_base = OTHER; note = 2'-O-methyluridine-3'-phosphate
  modified_base 16: mod_base = OTHER; note = 2'-O-methyluridine-3'-phosphate
  modified_base 17: mod_base = OTHER; note = 2'-O-methyladenosine-3'-phosphate
  modified_base 18: mod_base = OTHER; note = 2'-O-methylguanosine-3'-phosphate
  modified_base 19: mod_base = OTHER; note = 2'-O-methyladenosine-3'-phosphate
  modified_base 20: mod_base = OTHER; note = 2'-O-methyladenosine-3'-phosphate
  modified_base 21: mod_base = OTHER; note = 2'-O-methyluridine-3'-phosphate ((2S,4R)-1-[29-[[2-(acetylamino)-2-deoxy-beta-D-galactopyra nosyl]oxy]-14,14-bis[[3-[[3-[[5-[[2-(acetylamino)-2-deoxy-b eta-D-galactopyranosyl]oxy]-1-oxopentyl]amino]propyl]amino] -3-oxopropoxy]methyl]-1,12,19,25-tetraoxo-16-oxa-13,20,24-t riazanonacos-1-yl]-4-hydroxy-2-pyrrolidinyl)methyl ester
acacctgcacctgtttagaat

SEQ ID NO: 228 - RNA, 21 nt, synthetic construct
  source 1..21: mol_type = other RNA
  modified_base 1: mod_base = OTHER; note = 2'-O-methylcytidine-3'-phosphorothioate
  modified_base 2: mod_base = OTHER; note = 2'-O-methylcytidine-3'-phosphorothioate
  modified_base 3: mod_base = OTHER; note = 2'-O-methyluridine-3'-phosphate
  modified_base 4: mod_base = OTHER; note = 2'-O-methylguanosine-3'-phosphate
  modified_base 5: mod_base = OTHER; note = 2'-O-methyluridine-3'-phosphate
  modified_base 6: mod_base = OTHER; note = 2'-O-methyluridine-3'-phosphate
  modified_base 7: mod_base = OTHER; note = 2'-deoxy-2'-fluorouridine-3'-phosphate
  modified_base 8: mod_base = OTHER; note = 2'-O-methyladenosine-3'-phosphate
  modified_base 9: mod_base = OTHER; note = 2'-deoxy-2'-fluoroguanosine-3'-phosphate
  modified_base 10: mod_base = OTHER; note = 2'-deoxy-2'-fluoroadenosine-3'-phosphate
  modified_base 11: mod_base = OTHER; note = 2'-deoxy-2'-fluoroadenosine-3'-phosphate
  modified_base 12: mod_base = OTHER; note = 2'-O-methylguanosine-3'-phosphate
  modified_base 13: mod_base = OTHER; note = 2'-O-methylguanosine-3'-phosphate
  modified_base 14: mod_base = OTHER; note = 2'-O-methyladenosine-3'-phosphate
  modified_base 15: mod_base = OTHER; note = 2'-O-methyluridine-3'-phosphate
  modified_base 16: mod_base = OTHER; note = 2'-O-methyluridine-3'-phosphate
  modified_base 17: mod_base = OTHER; note = 2'-O-methylcytidine-3'-phosphate
  modified_base 18: mod_base = OTHER; note = 2'-O-methylguanosine-3'-phosphate
  modified_base 19: mod_base = OTHER; note = 2'-O-methyladenosine-3'-phosphate
  modified_base 20: mod_base = OTHER; note = 2'-O-methyladenosine-3'-phosphate
  modified_base 21: mod_base = OTHER; note = 2'-O-methyluridine-3'-phosphate ((2S,4R)-1-[29-[[2-(acetylamino)-2-deoxy-beta-D-galactopyra nosyl]oxy]-14,14-bis[[3-[[3-[[5-[[2-(acetylamino)-2-deoxy-b eta-D-galactopyranosyl]oxy]-1-oxopentyl]amino]propyl]amino] -3-oxopropoxy]methyl]-1,12,19,25-tetraoxo-16-oxa-13,20,24-t riazanonacos-1-yl]-4-hydroxy-2-pyrrolidinyl)methyl ester
cctgtttagaaggattcgaat

SEQ ID NO: 229 - RNA, 21 nt, synthetic construct
  source 1..21: mol_type = other RNA
  modified_base 1: mod_base = OTHER; note = 2'-O-methyladenosine-3'-phosphorothioate
  modified_base 2: mod_base = OTHER; note = 2'-O-methyladenosine-3'-phosphorothioate
  modified_base 3: mod_base = OTHER; note = 2'-O-methylcytidine-3'-phosphate
  modified_base 4: mod_base = OTHER; note = 2'-O-methyluridine-3'-phosphate
  modified_base 5: mod_base = OTHER; note = 2'-O-methylguanosine-3'-phosphate
  modified_base 6: mod_base = OTHER; note = 2'-O-methyluridine-3'-phosphate
  modified_base 7: mod_base = OTHER; note = 2'-deoxy-2'-fluoroguanosine-3'-phosphate
  modified_base 8: mod_base = OTHER; note = 2'-O-methyladenosine-3'-phosphate
  modified_base 9: mod_base = OTHER; note = 2'-deoxy-2'-fluoroadenosine-3'-phosphate
  modified_base 10: mod_base = OTHER; note = 2'-deoxy-2'-fluorouridine-3'-phosphate
  modified_base 11: mod_base = OTHER; note = 2'-deoxy-2'-fluorouridine-3'-phosphate
  modified_base 12: mod_base = OTHER; note = 2'-O-methyladenosine-3'-phosphate
  modified_base 13: mod_base = OTHER; note = 2'-O-methyluridine-3'-phosphate
  modified_base 14: mod_base = OTHER; note = 2'-O-methyluridine-3'-phosphate
  modified_base 15: mod_base = OTHER; note = 2'-O-methylcytidine-3'-phosphate
  modified_base 16: mod_base = OTHER; note = 2'-O-methyladenosine-3'-phosphate
  modified_base 17: mod_base = OTHER; note = 2'-O-methylcytidine-3'-phosphate
  modified_base 18: mod_base = OTHER; note = 2'-O-methyladenosine-3'-phosphate
  modified_base 19: mod_base = OTHER; note = 2'-O-methylcytidine-3'-phosphate
  modified_base 20: mod_base = OTHER; note = 2'-O-methylguanosine-3'-phosphate
  modified_base 21: mod_base = OTHER; note = 2'-O-methyluridine-3'-phosphate ((2S,4R)-1-[29-[[2-(acetylamino)-2-deoxy-beta-D-galactopyra nosyl]oxy]-14,14-bis[[3-[[3-[[5-[[2-(acetylamino)-2-deoxy-b eta-D-galactopyranosyl]oxy]-1-oxopentyl]amino]propyl]amino] -3-oxopropoxy]methyl]-1,12,19,25-tetraoxo-16-oxa-13,20,24-t riazanonacos-1-yl]-4-hydroxy-2-pyrrolidinyl)methyl ester
aactgtgaattattcacacgt

SEQ ID NO: 230 - RNA, 21 nt, synthetic construct
  source 1..21: mol_type = other RNA
  modified_base 1: mod_base = OTHER; note = 2'-O-methyluridine-3'-phosphorothioate
  modified_base 2: mod_base = OTHER; note = 2'-O-methyluridine-3'-phosphorothioate
  modified_base 3: mod_base = OTHER; note = 2'-O-methyladenosine-3'-phosphate
  modified_base 4: mod_base = OTHER; note = 2'-O-methyluridine-3'-phosphate
  modified_base 5: mod_base = OTHER; note = 2'-O-methyluridine-3'-phosphate
  modified_base 6: mod_base = OTHER; note = 2'-O-methylcytidine-3'-phosphate
  modified_base 7: mod_base = OTHER; note = 2'-deoxy-2'-fluoroadenosine-3'-phosphate
  modified_base 8: mod_base = OTHER; note = 2'-O-methylcytidine-3'-phosphate
  modified_base 9: mod_base = OTHER; note = 2'-deoxy-2'-fluoroadenosine-3'-phosphate
  modified_base 10: mod_base = OTHER; note = 2'-deoxy-2'-fluorocytidine-3'-phosphate
  modified_base 11: mod_base = OTHER; note = 2'-deoxy-2'-fluoroguanosine-3'-phosphate
  modified_base 12: mod_base = OTHER; note = 2'-O-methylguanosine-3'-phosphate
  modified_base 13: mod_base = OTHER; note = 2'-O-methyladenosine-3'-phosphate
  modified_base 14: mod_base = OTHER; note = 2'-O-methyladenosine-3'-phosphate
  modified_base 15: mod_base = OTHER; note = 2'-O-methylguanosine-3'-phosphate
  modified_base 16: mod_base = OTHER; note = 2'-O-methylcytidine-3'-phosphate
  modified_base 17: mod_base = OTHER; note = 2'-O-methyluridine-3'-phosphate
  modified_base 18: mod_base = OTHER; note = 2'-O-methylcytidine-3'-phosphate
  modified_base 19: mod_base = OTHER; note = 2'-O-methyluridine-3'-phosphate
  modified_base 20: mod_base = OTHER; note = 2'-O-methylguanosine-3'-phosphate
  modified_base 21: mod_base = OTHER; note = 2'-O-methyluridine-3'-phosphate ((2S,4R)-1-[29-[[2-(acetylamino)-2-deoxy-beta-D-galactopyra nosyl]oxy]-14,14-bis[[3-[[3-[[5-[[2-(acetylamino)-2-deoxy-b eta-D-galactopyranosyl]oxy]-1-oxopentyl]amino]propyl]amino] -3-oxopropoxy]methyl]-1,12,19,25-tetraoxo-16-oxa-13,20,24-t riazanonacos-1-yl]-4-hydroxy-2-pyrrolidinyl)methyl ester
ttattcacacggaagctctgt

SEQ ID NO: 231 - RNA, 21 nt, synthetic construct
  source 1..21: mol_type = other RNA
  modified_base 1: mod_base = OTHER; note = 2'-O-methylcytidine-3'-phosphorothioate
  modified_base 2: mod_base = OTHER; note = 2'-O-methyluridine-3'-phosphorothioate
  modified_base 3: mod_base = OTHER; note = 2'-O-methylcytidine-3'-phosphate
  modified_base 4: mod_base = OTHER; note = 2'-O-methyluridine-3'-phosphate
  modified_base 5: mod_base = OTHER; note = 2'-O-methylguanosine-3'-phosphate
  modified_base 6: mod_base = OTHER; note = 2'-O-methylcytidine-3'-phosphate
  modified_base 7: mod_base = OTHER; note = 2'-deoxy-2'-fluoroadenosine-3'-phosphate
  modified_base 8: mod_base = OTHER; note = 2'-O-methylguanosine-3'-phosphate
  modified_base 9: mod_base = OTHER; note = 2'-deoxy-2'-fluorocytidine-3'-phosphate
  modified_base 10: mod_base = OTHER; note = 2'-deoxy-2'-fluorocytidine-3'-phosphate
  modified_base 11: mod_base = OTHER; note = 2'-deoxy-2'-fluorouridine-3'-phosphate
  modified_base 12: mod_base = OTHER; note = 2'-O-methylguanosine-3'-phosphate
  modified_base 13: mod_base = OTHER; note = 2'-O-methylguanosine-3'-phosphate
  modified_base 14: mod_base = OTHER; note = 2'-O-methyladenosine-3'-phosphate
  modified_base 15: mod_base = OTHER; note = 2'-O-methylcytidine-3'-phosphate
  modified_base 16: mod_base = OTHER; note = 2'-O-methyladenosine-3'-phosphate
  modified_base 17: mod_base = OTHER; note = 2'-O-methyladenosine-3'-phosphate
  modified_base 18: mod_base = OTHER; note = 2'-O-methylcytidine-3'-phosphate
  modified_base 19: mod_base = OTHER; note = 2'-O-methylguanosine-3'-phosphate
  modified_base 20: mod_base = OTHER; note = 2'-O-methylguanosine-3'-phosphate
  modified_base 21: mod_base = OTHER; note = 2'-O-methyluridine-3'-phosphate ((2S,4R)-1-[29-[[2-(acetylamino)-2-deoxy-beta-D-galactopyra nosyl]oxy]-14,14-bis[[3-[[3-[[5-[[2-(acetylamino)-2-deoxy-b eta-D-galactopyranosyl]oxy]-1-oxopentyl]amino]propyl]amino] -3-oxopropoxy]methyl]-1,12,19,25-tetraoxo-16-oxa-13,20,24-t riazanonacos-1-yl]-4-hydroxy-2-pyrrolidinyl)methyl ester
ctctgcagcctggacaacggt

SEQ ID NO: 232 - RNA, 21 nt, synthetic construct
  source 1..21: mol_type = other RNA
  modified_base 1: mod_base = OTHER; note = 2'-O-methyluridine-3'-phosphorothioate
  modified_base 2: mod_base = OTHER; note = 2'-O-methylguanosine-3'-phosphorothioate
  modified_base 3: mod_base = OTHER; note = 2'-O-methyluridine-3'-phosphate
  modified_base 4: mod_base = OTHER; note = 2'-O-methylguanosine-3'-phosphate
  modified_base 5: mod_base = OTHER; note = 2'-O-methyladenosine-3'-phosphate
  modified_base 6: mod_base = OTHER; note = 2'-O-methylcytidine-3'-phosphate
  modified_base 7: mod_base = OTHER; note = 2'-deoxy-2'-fluorocytidine-3'-phosphate
  modified_base 8: mod_base = OTHER; note = 2'-O-methyladenosine-3'-phosphate
  modified_base 9: mod_base = OTHER; note = 2'-deoxy-2'-fluoroguanosine-3'-phosphate
  modified_base 10: mod_base = OTHER; note = 2'-deoxy-2'-fluorouridine-3'-phosphate
  modified_base 11: mod_base = OTHER; note = 2'-deoxy-2'-fluorouridine-3'-phosphate
  modified_base 12: mod_base = OTHER; note = 2'-O-methylcytidine-3'-phosphate
  modified_base 13: mod_base = OTHER; note = 2'-O-methyluridine-3'-phosphate
  modified_base 14: mod_base = OTHER; note = 2'-O-methylguanosine-3'-phosphate
  modified_base 15: mod_base = OTHER; note = 2'-O-methylcytidine-3'-phosphate
  modified_base 16: mod_base = OTHER; note = 2'-O-methylcytidine-3'-phosphate
  modified_base 17: mod_base = OTHER; note = 2'-O-methyladenosine-3'-phosphate
  modified_base 18: mod_base = OTHER; note = 2'-O-methylcytidine-3'-phosphate
  modified_base 19: mod_base = OTHER; note = 2'-O-methylguanosine-3'-phosphate
  modified_base 20: mod_base = OTHER; note = 2'-O-methyladenosine-3'-phosphate
  modified_base 21: mod_base = OTHER; note = 2'-O-methyluridine-3'-phosphate ((2S,4R)-1-[29-[[2-(acetylamino)-2-deoxy-beta-D-galactopyra nosyl]oxy]-14,14-bis[[3-[[3-[[5-[[2-(acetylamino)-2-deoxy-b eta-D-galactopyranosyl]oxy]-1-oxopentyl]amino]propyl]amino] -3-oxopropoxy]methyl]-1,12,19,25-tetraoxo-16-oxa-13,20,24-t riazanonacos-1-yl]-4-hydroxy-2-pyrrolidinyl)methyl ester
tgtgaccagttctgccacgat

SEQ ID NO: 233 - RNA, 21 nt, synthetic construct
  source 1..21: mol_type = other RNA
  modified_base 1: mod_base = OTHER; note = 2'-O-methylcytidine-3'-phosphorothioate
  modified_base 2: mod_base = OTHER; note = 2'-O-methyladenosine-3'-phosphorothioate
  modified_base 3: mod_base = OTHER; note = 2'-O-methylcytidine-3'-phosphate
  modified_base 4: mod_base = OTHER; note = 2'-O-methylguanosine-3'-phosphate
  modified_base 5: mod_base = OTHER; note = 2'-O-methyladenosine-3'-phosphate
  modified_base 6: mod_base = OTHER; note = 2'-O-methylguanosine-3'-phosphate
  modified_base 7: mod_base = OTHER; note = 2'-deoxy-2'-fluoroguanosine-3'-phosphate
  modified_base 8: mod_base = OTHER; note = 2'-O-methyladenosine-3'-phosphate
  modified_base 9: mod_base = OTHER; note = 2'-deoxy-2'-fluoroadenosine-3'-phosphate
  modified_base 10: mod_base = OTHER; note = 2'-deoxy-2'-fluorocytidine-3'-phosphate
  modified_base 11: mod_base = OTHER; note = 2'-deoxy-2'-fluoroadenosine-3'-phosphate
  modified_base 12: mod_base = OTHER; note = 2'-O-methylguanosine-3'-phosphate
  modified_base 13: mod_base = OTHER; note = 2'-O-methyladenosine-3'-phosphate
  modified_base 14: mod_base = OTHER; note = 2'-O-methyladenosine-3'-phosphate
  modified_base 15: mod_base = OTHER; note = 2'-O-methylcytidine-3'-phosphate
  modified_base 16: mod_base = OTHER; note = 2'-O-methyluridine-3'-phosphate
  modified_base 17: mod_base = OTHER; note = 2'-O-methylcytidine-3'-phosphate
  modified_base 18: mod_base = OTHER; note = 2'-O-methyluridine-3'-phosphate
  modified_base 19: mod_base = OTHER; note = 2'-O-methylguanosine-3'-phosphate
  modified_base 20: mod_base = OTHER; note = 2'-O-methyluridine-3'-phosphate
  modified_base 21: mod_base = OTHER; note = 2'-O-methyluridine-3'-phosphate ((2S,4R)-1-[29-[[2-(acetylamino)-2-deoxy-beta-D-galactopyra nosyl]oxy]-14,14-bis[[3-[[3-[[5-[[2-(acetylamino)-2-deoxy-b eta-D-galactopyranosyl]oxy]-1-oxopentyl]amino]propyl]amino] -3-oxopropoxy]methyl]-1,12,19,25-tetraoxo-16-oxa-13,20,24-t riazanonacos-1-yl]-4-hydroxy-2-pyrrolidinyl)methyl ester
cacgaggaacagaactctgtt

SEQ ID NO: 234 - RNA, 21 nt, synthetic construct
  source 1..21: mol_type = other RNA
  modified_base 1: mod_base = OTHER; note = 2'-O-methylguanosine-3'-phosphorothioate
  modified_base 2: mod_base = OTHER; note = 2'-O-methyladenosine-3'-phosphorothioate
  modified_base 3: mod_base = OTHER; note = 2'-O-methyladenosine-3'-phosphate
  modified_base 4: mod_base = OTHER; note = 2'-O-methylcytidine-3'-phosphate
  modified_base 5: mod_base = OTHER; note = 2'-O-methyluridine-3'-phosphate
  modified_base 6: mod_base = OTHER; note = 2'-O-methylcytidine-3'-phosphate
  modified_base 7: mod_base = OTHER; note = 2'-deoxy-2'-fluorouridine-3'-phosphate
  modified_base 8: mod_base = OTHER; note = 2'-O-methylguanosine-3'-phosphate
  modified_base 9: mod_base = OTHER; note = 2'-deoxy-2'-fluorouridine-3'-phosphate
  modified_base 10: mod_base = OTHER; note = 2'-deoxy-2'-fluoroguanosine-3'-phosphate
  modified_base 11: mod_base = OTHER; note = 2'-deoxy-2'-fluoroguanosine-3'-phosphate
  modified_base 12: mod_base = OTHER; note = 2'-O-methyluridine-3'-phosphate
  modified_base 13: mod_base = OTHER; note = 2'-O-methylguanosine-3'-phosphate
  modified_base 14: mod_base = OTHER; note = 2'-O-methyluridine-3'-phosphate
  modified_base 15: mod_base = OTHER; note = 2'-O-methylguanosine-3'-phosphate
  modified_base 16: mod_base = OTHER; note = 2'-O-methylcytidine-3'-phosphate
  modified_base 17: mod_base = OTHER; note = 2'-O-methyluridine-3'-phosphate
  modified_base 18: mod_base = OTHER; note = 2'-O-methylcytidine-3'-phosphate
  modified_base 19: mod_base = OTHER; note = 2'-O-methylcytidine-3'-phosphate
  modified_base 20: mod_base = OTHER; note = 2'-O-methyluridine-3'-phosphate
  modified_base 21: mod_base = OTHER; note = 2'-O-methyluridine-3'-phosphate ((2S,4R)-1-[29-[[2-(acetylamino)-2-deoxy-beta-D-galactopyra nosyl]oxy]-14,14-bis[[3-[[3-[[5-[[2-(acetylamino)-2-deoxy-b eta-D-galactopyranosyl]oxy]-1-oxopentyl]amino]propyl]amino] -3-oxopropoxy]methyl]-1,12,19,25-tetraoxo-16-oxa-13,20,24-t riazanonacos-1-yl]-4-hydroxy-2-pyrrolidinyl)methyl ester
gaactctgtggtgtgctcctt

SEQ ID NO: 235 - RNA, 21 nt, synthetic construct
  source 1..21: mol_type = other RNA
  modified_base 1: mod_base = OTHER; note = 2'-O-methylcytidine-3'-phosphorothioate
  modified_base 2: mod_base = OTHER; note = 2'-O-methylcytidine-3'-phosphorothioate
  modified_base 3: mod_base = OTHER; note = 2'-O-methyluridine-3'-phosphate
  modified_base 4: mod_base = OTHER; note = 2'-O-methylguanosine-3'-phosphate
  modified_base 5: mod_base = OTHER; note = 2'-O-methylguanosine-3'-phosphate
  modified_base 6: mod_base = OTHER; note = 2'-O-methylcytidine-3'-phosphate
  modified_base 7: mod_base = OTHER; note = 2'-deoxy-2'-fluorouridine-3'-phosphate
  modified_base 8: mod_base = OTHER; note = 2'-O-methylguanosine-3'-phosphate
  modified_base 9: mod_base = OTHER; note = 2'-deoxy-2'-fluoroadenosine-3'-phosphate
  modified_base 10: mod_base = OTHER; note = 2'-deoxy-2'-fluorocytidine-3'-phosphate
  modified_base 11: mod_base = OTHER; note = 2'-deoxy-2'-fluoroadenosine-3'-phosphate
  modified_base 12: mod_base = OTHER; note = 2'-O-methyladenosine-3'-phosphate
  modified_base 13: mod_base = OTHER; note = 2'-O-methylcytidine-3'-phosphate
  modified_base 14: mod_base = OTHER; note = 2'-O-methylguanosine-3'-phosphate
  modified_base 15: mod_base = OTHER; note = 2'-O-methylguanosine-3'-phosphate
  modified_base 16: mod_base = OTHER; note = 2'-O-methylcytidine-3'-phosphate
  modified_base 17: mod_base = OTHER; note = 2'-O-methyladenosine-3'-phosphate
  modified_base 18: mod_base = OTHER; note = 2'-O-methyladenosine-3'-phosphate
  modified_base 19: mod_base = OTHER; note = 2'-O-methylguanosine-3'-phosphate
  modified_base 20: mod_base = OTHER; note = 2'-O-methylguanosine-3'-phosphate
  modified_base 21: mod_base = OTHER; note = 2'-O-methyluridine-3'-phosphate ((2S,4R)-1-[29-[[2-(acetylamino)-2-deoxy-beta-D-galactopyra nosyl]oxy]-14,14-bis[[3-[[3-[[5-[[2-(acetylamino)-2-deoxy-b eta-D-galactopyranosyl]oxy]-1-oxopentyl]amino]propyl]amino] -3-oxopropoxy]methyl]-1,12,19,25-tetraoxo-16-oxa-13,20,24-t riazanonacos-1-yl]-4-hydroxy-2-pyrrolidinyl)methyl ester
cctggctgacaacggcaaggt

SEQ ID NO: 236 - RNA, 21 nt, synthetic construct
  source 1..21: mol_type = other RNA
  modified_base 1: mod_base = OTHER; note = 2'-O-methyladenosine-3'-phosphorothioate
  modified_base 2: mod_base = OTHER; note = 2'-O-methylguanosine-3'-phosphorothioate
  modified_base 3: mod_base = OTHER; note = 2'-O-methylguanosine-3'-phosphate
  modified_base 4: mod_base = OTHER; note = 2'-O-methylcytidine-3'-phosphate
  modified_base 5: mod_base = OTHER; note = 2'-O-methylcytidine-3'-phosphate
  modified_base 6: mod_base = OTHER; note = 2'-O-methyluridine-3'-phosphate
  modified_base 7: mod_base = OTHER; note = 2'-deoxy-2'-fluoroguanosine-3'-phosphate
  modified_base 8: mod_base = OTHER; note = 2'-O-methylcytidine-3'-phosphate
  modified_base 9: mod_base = OTHER; note = 2'-deoxy-2'-fluoroadenosine-3'-phosphate
  modified_base 10: mod_base = OTHER; note = 2'-deoxy-2'-fluorouridine-3'-phosphate
  modified_base 11: mod_base = OTHER; note = 2'-deoxy-2'-fluorouridine-3'-phosphate
  modified_base 12: mod_base = OTHER; note = 2'-O-methylcytidine-3'-phosphate
  modified_base 13: mod_base = OTHER; note = 2'-O-methylcytidine-3'-phosphate
  modified_base 14: mod_base = OTHER; note = 2'-O-methylcytidine-3'-phosphate
  modified_base 15: mod_base = OTHER; note = 2'-O-methyladenosine-3'-phosphate
  modified_base 16: mod_base = OTHER; note = 2'-O-methylcytidine-3'-phosphate
  modified_base 17: mod_base = OTHER; note = 2'-O-methyladenosine-3'-phosphate
  modified_base 18: mod_base = OTHER; note = 2'-O-methylguanosine-3'-phosphate
  modified_base 19: mod_base = OTHER; note = 2'-O-methylguanosine-3'-phosphate
  modified_base 20: mod_base = OTHER; note = 2'-O-methylguanosine-3'-phosphate
  modified_base 21: mod_base = OTHER; note = 2'-O-methyluridine-3'-phosphate ((2S,4R)-1-[29-[[2-(acetylamino)-2-deoxy-beta-D-galactopyra nosyl]oxy]-14,14-bis[[3-[[3-[[5-[[2-(acetylamino)-2-deoxy-b eta-D-galactopyranosyl]oxy]-1-oxopentyl]amino]propyl]amino] -3-oxopropoxy]methyl]-1,12,19,25-tetraoxo-16-oxa-13,20,24-t riazanonacos-1-yl]-4-hydroxy-2-pyrrolidinyl)methyl ester
aggcctgcattcccacagggt

SEQ ID NO: 237 - RNA, 21 nt, synthetic construct
  source 1..21: mol_type = other RNA
  modified_base 1: mod_base = OTHER; note = 2'-O-methyluridine-3'-phosphorothioate
  modified_base 2: mod_base = OTHER; note = 2'-O-methylguanosine-3'-phosphorothioate
  modified_base 3: mod_base = OTHER; note = 2'-O-methyluridine-3'-phosphate
  modified_base 4: mod_base = OTHER; note = 2'-O-methylguanosine-3'-phosphate
  modified_base 5: mod_base = OTHER; note = 2'-O-methylguanosine-3'-phosphate
  modified_base 6: mod_base = OTHER; note = 2'-O-methylguanosine-3'-phosphate
  modified_base 7: mod_base = OTHER; note = 2'-deoxy-2'-fluoroadenosine-3'-phosphate
  modified_base 8: mod_base = OTHER; note = 2'-O-methyladenosine-3'-phosphate
  modified_base 9: mod_base = OTHER; note = 2'-deoxy-2'-fluoroadenosine-3'-phosphate
  modified_base 10: mod_base = OTHER; note = 2'-deoxy-2'-fluorocytidine-3'-phosphate
  modified_base 11: mod_base = OTHER; note = 2'-deoxy-2'-fluoroadenosine-3'-phosphate
  modified_base 12: mod_base = OTHER; note = 2'-O-methylguanosine-3'-phosphate
  modified_base 13: mod_base = OTHER; note = 2'-O-methyladenosine-3'-phosphate
  modified_base 14: mod_base = OTHER; note = 2'-O-methylcytidine-3'-phosphate
  modified_base 15: mod_base = OTHER; note = 2'-O-methylcytidine-3'-phosphate
  modified_base 16: mod_base = OTHER; note = 2'-O-methylcytidine-3'-phosphate
  modified_base 17: mod_base = OTHER; note = 2'-O-methyluridine-3'-phosphate
  modified_base 18: mod_base = OTHER; note = 2'-O-methylguanosine-3'-phosphate
  modified_base 19: mod_base = OTHER; note = 2'-O-methylguanosine-3'-phosphate
  modified_base 20: mod_base = OTHER; note = 2'-O-methyladenosine-3'-phosphate
  modified_base 21: mod_base = OTHER; note = 2'-O-methyluridine-3'-phosphate ((2S,4R)-1-[29-[[2-(acetylamino)-2-deoxy-beta-D-galactopyra nosyl]oxy]-14,14-bis[[3-[[3-[[5-[[2-(acetylamino)-2-deoxy-b eta-D-galactopyranosyl]oxy]-1-oxopentyl]amino]propyl]amino] -3-oxopropoxy]methyl]-1,12,19,25-tetraoxo-16-oxa-13,20,24-t riazanonacos-1-yl]-4-hydroxy-2-pyrrolidinyl)methyl ester
tgtgggaaacagaccctggat

SEQ ID NO: 238 - RNA, 21 nt, synthetic construct
  source 1..21: mol_type = other RNA
  modified_base 1: mod_base = OTHER; note = 2'-O-methyladenosine-3'-phosphorothioate
  modified_base 2: mod_base = OTHER; note = 2'-O-methylguanosine-3'-phosphorothioate
  modified_base 3: mod_base = OTHER; note = 2'-O-methyladenosine-3'-phosphate
  modified_base 4: mod_base = OTHER; note = 2'-O-methylcytidine-3'-phosphate
  modified_base 5: mod_base = OTHER; note = 2'-O-methylcytidine-3'-phosphate
  modified_base 6: mod_base = OTHER; note = 2'-O-methylcytidine-3'-phosphate
  modified_base 7: mod_base = OTHER; note = 2'-deoxy-2'-fluorouridine-3'-phosphate
  modified_base 8: mod_base = OTHER; note = 2'-O-methylguanosine-3'-phosphate
  modified_base 9: mod_base = OTHER; note = 2'-deoxy-2'-fluoroguanosine-3'-phosphate
  modified_base 10: mod_base = OTHER; note = 2'-deoxy-2'-fluoroadenosine-3'-phosphate
  modified_base 11: mod_base = OTHER; note = 2'-deoxy-2'-fluoroadenosine-3'-phosphate
  modified_base 12: mod_base = OTHER; note = 2'-O-methylcytidine-3'-phosphate
  modified_base 13: mod_base = OTHER; note = 2'-O-methylguanosine-3'-phosphate
  modified_base 14: mod_base = OTHER; note = 2'-O-methylcytidine-3'-phosphate
  modified_base 15: mod_base = OTHER; note = 2'-O-methyladenosine-3'-phosphate
  modified_base 16: mod_base = OTHER; note = 2'-O-methylguanosine-3'-phosphate
  modified_base 17: mod_base = OTHER; note = 2'-O-methylguanosine-3'-phosphate
  modified_base 18: mod_base = OTHER; note = 2'-O-methyladenosine-3'-phosphate
  modified_base 19: mod_base = OTHER; note = 2'-O-methyladenosine-3'-phosphate
  modified_base 20: mod_base = OTHER; note = 2'-O-methylguanosine-3'-phosphate
  modified_base 21: mod_base = OTHER; note = 2'-O-methyluridine-3'-phosphate ((2S,4R)-1-[29-[[2-(acetylamino)-2-deoxy-beta-D-galactopyra nosyl]oxy]-14,14-bis[[3-[[3-[[5-[[2-(acetylamino)-2-deoxy-b eta-D-galactopyranosyl]oxy]-1-oxopentyl]amino]propyl]amino] -3-oxopropoxy]methyl]-1,12,19,25-tetraoxo-16-oxa-13,20,24-t riazanonacos-1-yl]-4-hydroxy-2-pyrrolidinyl)methyl ester
agaccctggaacgcaggaagt

SEQ ID NO: 239 - RNA, 21 nt, synthetic construct
  source 1..21: mol_type = other RNA
  modified_base 1: mod_base = OTHER; note = 2'-O-methyladenosine-3'-phosphorothioate
  modified_base 2: mod_base = OTHER; note = 2'-O-methyladenosine-3'-phosphorothioate
  modified_base 3: mod_base = OTHER; note = 2'-O-methylcytidine-3'-phosphate
  modified_base 4: mod_base = OTHER; note = 2'-O-methylguanosine-3'-phosphate
  modified_base 5: mod_base = OTHER; note = 2'-O-methylcytidine-3'-phosphate
  modified_base 6: mod_base = OTHER; note = 2'-O-methyladenosine-3'-phosphate
  modified_base 7: mod_base = OTHER; note = 2'-deoxy-2'-fluoroguanosine-3'-phosphate
  modified_base 8: mod_base = OTHER; note = 2'-O-methylguanosine-3'-phosphate
  modified_base 9: mod_base = OTHER; note = 2'-deoxy-2'-fluoroadenosine-3'-phosphate
  modified_base 10: mod_base = OTHER; note = 2'-deoxy-2'-fluoroadenosine-3'-phosphate
  modified_base 11: mod_base = OTHER; note = 2'-deoxy-2'-fluoroguanosine-3'-phosphate
  modified_base 12: mod_base = OTHER; note = 2'-O-methyladenosine-3'-phosphate
  modified_base 13: mod_base = OTHER; note = 2'-O-methylguanosine-3'-phosphate
  modified_base 14: mod_base = OTHER; note = 2'-O-methylguanosine-3'-phosphate
  modified_base 15: mod_base = OTHER; note = 2'-O-methyluridine-3'-phosphate
  modified_base 16: mod_base = OTHER; note = 2'-O-methylcytidine-3'-phosphate
  modified_base 17: mod_base = OTHER; note = 2'-O-methyladenosine-3'-phosphate
  modified_base 18: mod_base = OTHER; note = 2'-O-methylguanosine-3'-phosphate
  modified_base 19: mod_base = OTHER; note = 2'-O-methyluridine-3'-phosphate
  modified_base 20: mod_base = OTHER; note = 2'-O-methylguanosine-3'-phosphate
  modified_base 21: mod_base = OTHER; note = 2'-O-methyluridine-3'-phosphate ((2S,4R)-1-[29-[[2-(acetylamino)-2-deoxy-beta-D-galactopyra nosyl]oxy]-14,14-bis[[3-[[3-[[5-[[2-(acetylamino)-2-deoxy-b eta-D-galactopyranosyl]oxy]-1-oxopentyl]amino]propyl]amino] -3-oxopropoxy]methyl]-1,12,19,25-tetraoxo-16-oxa-13,20,24-t riazanonacos-1-yl]-4-hydroxy-2-pyrrolidinyl)methyl ester
aacgcaggaagaggtcagtgt

SEQ ID NO: 240 - RNA, 21 nt, synthetic construct
  source 1..21: mol_type = other RNA
  modified_base 1: mod_base = OTHER; note = 2'-O-methylcytidine-3'-phosphorothioate
  modified_base 2: mod_base = OTHER; note = 2'-O-methyluridine-3'-phosphorothioate
  modified_base 3: mod_base = OTHER; note = 2'-O-methylguanosine-3'-phosphate
  modified_base 4: mod_base = OTHER; note = 2'-O-methyladenosine-3'-phosphate
  modified_base 5: mod_base = OTHER; note = 2'-O-methylcytidine-3'-phosphate
  modified_base 6: mod_base = OTHER; note = 2'-O-methyladenosine-3'-phosphate
  modified_base 7: mod_base = OTHER; note = 2'-deoxy-2'-fluoroguanosine-3'-phosphate
  modified_base 8: mod_base = OTHER; note = 2'-O-methylcytidine-3'-phosphate
  modified_base 9: mod_base = OTHER; note = 2'-deoxy-2'-fluoroadenosine-3'-phosphate
  modified_base 10: mod_base = OTHER; note = 2'-deoxy-2'-fluorouridine-3'-phosphate
  modified_base 11: mod_base = OTHER; note = 2'-deoxy-2'-fluorocytidine-3'-phosphate
  modified_base 12: mod_base = OTHER; note = 2'-O-methyladenosine-3'-phosphate
  modified_base 13: mod_base = OTHER; note = 2'-O-methylcytidine-3'-phosphate
  modified_base 14: mod_base = OTHER; note = 2'-O-methyladenosine-3'-phosphate
  modified_base 15: mod_base = OTHER; note = 2'-O-methyluridine-3'-phosphate
  modified_base 16: mod_base = OTHER; note = 2'-O-methylguanosine-3'-phosphate
  modified_base 17: mod_base = OTHER; note = 2'-O-methylguanosine-3'-phosphate
  modified_base 18: mod_base = OTHER; note = 2'-O-methyladenosine-3'-phosphate
  modified_base 19: mod_base = OTHER; note = 2'-O-methyladenosine-3'-phosphate
  modified_base 20: mod_base = OTHER; note = 2'-O-methylguanosine-3'-phosphate
  modified_base 21: mod_base = OTHER; note = 2'-O-methyluridine-3'-phosphate ((2S,4R)-1-[29-[[2-(acetylamino)-2-deoxy-beta-D-galactopyra nosyl]oxy]-14,14-bis[[3-[[3-[[5-[[2-(acetylamino)-2-deoxy-b eta-D-galactopyranosyl]oxy]-1-oxopentyl]amino]propyl]amino] -3-oxopropoxy]methyl]-1,12,19,25-tetraoxo-16-oxa-13,20,24-t riazanonacos-1-yl]-4-hydroxy-2-pyrrolidinyl)methyl ester
ctgacagcatcacatggaagt

SEQ ID NO: 241 - RNA, 21 nt, synthetic construct
  source 1..21: mol_type = other RNA
  modified_base 1: mod_base = OTHER; note = 2'-O-methyluridine-3'-phosphorothioate
  modified_base 2: mod_base = OTHER; note = 2'-O-methylcytidine-3'-phosphorothioate
  modified_base 3: mod_base = OTHER; note = 2'-O-methyladenosine-3'-phosphate
  modified_base 4: mod_base = OTHER; note = 2'-O-methylcytidine-3'-phosphate
  modified_base 5: mod_base = OTHER; note = 2'-O-methyladenosine-3'-phosphate
  modified_base 6: mod_base = OTHER; note = 2'-O-methyluridine-3'-phosphate
  modified_base 7: mod_base = OTHER; note = 2'-deoxy-2'-fluoroguanosine-3'-phosphate
  modified_base 8: mod_base = OTHER; note = 2'-O-methylguanosine-3'-phosphate
  modified_base 9: mod_base = OTHER; note = 2'-deoxy-2'-fluoroadenosine-3'-phosphate
  modified_base 10: mod_base = OTHER; note = 2'-deoxy-2'-fluoroadenosine-3'-phosphate
  modified_base 11: mod_base = OTHER; note = 2'-deoxy-2'-fluoroguanosine-3'-phosphate
  modified_base 12: mod_base = OTHER; note = 2'-O-methylcytidine-3'-phosphate
  modified_base 13: mod_base = OTHER; note = 2'-O-methylcytidine-3'-phosphate
  modified_base 14: mod_base = OTHER; note = 2'-O-methyladenosine-3'-phosphate
  modified_base 15: mod_base = OTHER; note = 2'-O-methyluridine-3'-phosphate
  modified_base 16: mod_base = OTHER; note = 2'-O-methyladenosine-3'-phosphate
  modified_base 17: mod_base = OTHER; note = 2'-O-methyluridine-3'-phosphate
  modified_base 18: mod_base = OTHER; note = 2'-O-methylguanosine-3'-phosphate
  modified_base 19: mod_base = OTHER; note = 2'-O-methyladenosine-3'-phosphate
  modified_base 20: mod_base = OTHER; note = 2'-O-methyluridine-3'-phosphate
  modified_base 21: mod_base = OTHER; note = 2'-O-methyluridine-3'-phosphate ((2S,4R)-1-[29-[[2-(acetylamino)-2-deoxy-beta-D-galactopyra nosyl]oxy]-14,14-bis[[3-[[3-[[5-[[2-(acetylamino)-2-deoxy-b eta-D-galactopyranosyl]oxy]-1-oxopentyl]amino]propyl]amino] -3-oxopropoxy]methyl]-1,12,19,25-tetraoxo-16-oxa-13,20,24-t riazanonacos-1-yl]-4-hydroxy-2-pyrrolidinyl)methyl ester
tcacatggaagccatatgatt

SEQ ID NO: 242 - RNA, 21 nt, synthetic construct
  source 1..21: mol_type = other RNA
  modified_base 1: mod_base = OTHER; note = 2'-O-methyladenosine-3'-phosphorothioate
  modified_base 2: mod_base = OTHER; note = 2'-O-methylguanosine-3'-phosphorothioate
  modified_base 3: mod_base = OTHER; note = 2'-O-methylcytidine-3'-phosphate
  modified_base 4: mod_base = OTHER; note = 2'-O-methylcytidine-3'-phosphate
  modified_base 5: mod_base = OTHER; note = 2'-O-methyladenosine-3'-phosphate
  modified_base 6: mod_base = OTHER; note = 2'-O-methyluridine-3'-phosphate
  modified_base 7: mod_base = OTHER; note = 2'-deoxy-2'-fluoroadenosine-3'-phosphate
  modified_base 8: mod_base = OTHER; note = 2'-O-methyluridine-3'-phosphate
  modified_base 9: mod_base = OTHER; note = 2'-deoxy-2'-fluoroguanosine-3'-phosphate
  modified_base 10: mod_base = OTHER; note = 2'-deoxy-2'-fluoroadenosine-3'-phosphate
  modified_base 11: mod_base = OTHER; note = 2'-deoxy-2'-fluorouridine-3'-phosphate
  modified_base 12: mod_base = OTHER; note = 2'-O-methylguanosine-3'-phosphate
  modified_base 13: mod_base = OTHER; note = 2'-O-methylcytidine-3'-phosphate
  modified_base 14: mod_base = OTHER; note = 2'-O-methyladenosine-3'-phosphate
  modified_base 15: mod_base = OTHER; note = 2'-O-methylguanosine-3'-phosphate
  modified_base 16: mod_base = OTHER; note = 2'-O-methylcytidine-3'-phosphate
  modified_base 17: mod_base = OTHER; note = 2'-O-methylcytidine-3'-phosphate
  modified_base 18: mod_base = OTHER; note = 2'-O-methylguanosine-3'-phosphate
  modified_base 19: mod_base = OTHER; note = 2'-O-methyladenosine-3'-phosphate
  modified_base 20: mod_base = OTHER; note = 2'-O-methylcytidine-3'-phosphate
  modified_base 21: mod_base = OTHER; note = 2'-O-methyluridine-3'-phosphate ((2S,4R)-1-[29-[[2-(acetylamino)-2-deoxy-beta-D-galactopyra nosyl]oxy]-14,14-bis[[3-[[3-[[5-[[2-(acetylamino)-2-deoxy-b eta-D-galactopyranosyl]oxy]-1-oxopentyl]amino]propyl]amino] -3-oxopropoxy]methyl]-1,12,19,25-tetraoxo-16-oxa-13,20,24-t riazanonacos-1-yl]-4-hydroxy-2-pyrrolidinyl)methyl ester
agccatatgatgcagccgact

SEQ ID NO: 243 - RNA, 21 nt, synthetic construct
  source 1..21: mol_type = other RNA
  modified_base 1: mod_base = OTHER; note = 2'-O-methylcytidine-3'-phosphorothioate
  modified_base 2: mod_base = OTHER; note = 2'-O-methyluridine-3'-phosphorothioate
  modified_base 3: mod_base = OTHER; note = 2'-O-methylguanosine-3'-phosphate
  modified_base 4: mod_base = OTHER; note = 2'-O-methylcytidine-3'-phosphate
  modified_base 5: mod_base = OTHER; note = 2'-O-methyluridine-3'-phosphate
  modified_base 6: mod_base = OTHER; note = 2'-O-methyluridine-3'-phosphate
  modified_base 7: mod_base = OTHER; note = 2'-deoxy-2'-fluoroguanosine-3'-phosphate
  modified_base 8: mod_base = OTHER; note = 2'-O-methyladenosine-3'-phosphate
  modified_base 9: mod_base = OTHER; note = 2'-deoxy-2'-fluorocytidine-3'-phosphate
  modified_base 10: mod_base = OTHER; note = 2'-deoxy-2'-fluorouridine-3'-phosphate
  modified_base 11: mod_base = OTHER; note = 2'-deoxy-2'-fluorouridine-3'-phosphate
  modified_base 12: mod_base = OTHER; note = 2'-O-methylcytidine-3'-phosphate
  modified_base 13: mod_base = OTHER; note = 2'-O-methyladenosine-3'-phosphate
  modified_base 14: mod_base = OTHER; note = 2'-O-methyladenosine-3'-phosphate
  modified_base 15: mod_base = OTHER; note = 2'-O-methylcytidine-3'-phosphate
  modified_base 16: mod_base = OTHER; note = 2'-O-methylcytidine-3'-phosphate
  modified_base 17: mod_base = OTHER; note = 2'-O-methyladenosine-3'-phosphate
  modified_base 18: mod_base = OTHER; note = 2'-O-methylguanosine-3'-phosphate
  modified_base 19: mod_base = OTHER; note = 2'-O-methyladenosine-3'-phosphate
  modified_base 20: mod_base = OTHER; note = 2'-O-methylcytidine-3'-phosphate
  modified_base 21: mod_base = OTHER; note = 2'-O-methyluridine-3'-phosphate ((2S,4R)-1-[29-[[2-(acetylamino)-2-deoxy-beta-D-galactopyra nosyl]oxy]-14,14-bis[[3-[[3-[[5-[[2-(acetylamino)-2-deoxy-b eta-D-galactopyranosyl]oxy]-1-oxopentyl]amino]propyl]amino] -3-oxopropoxy]methyl]-1,12,19,25-tetraoxo-16-oxa-13,20,24-t riazanonacos-1-yl]-4-hydroxy-2-pyrrolidinyl)methyl ester
ctgcttgacttcaaccagact

SEQ ID NO: 244 - RNA, 21 nt, synthetic construct
  source 1..21: mol_type = other RNA
  modified_base 1: mod_base = OTHER; note = 2'-O-methyluridine-3'-phosphorothioate
  modified_base 2: mod_base = OTHER; note = 2'-O-methyluridine-3'-phosphorothioate
  modified_base 3: mod_base = OTHER; note = 2'-O-methylcytidine-3'-phosphate
  modified_base 4: mod_base = OTHER; note = 2'-O-methyladenosine-3'-phosphate
  modified_base 5: mod_base = OTHER; note = 2'-O-methyladenosine-3'-phosphate
  modified_base 6: mod_base = OTHER; note = 2'-O-methylcytidine-3'-phosphate
  modified_base 7: mod_base = OTHER; note = 2'-deoxy-2'-fluorocytidine-3'-phosphate
  modified_base 8: mod_base = OTHER; note = 2'-O-methyladenosine-3'-phosphate
  modified_base 9: mod_base = OTHER; note = 2'-deoxy-2'-fluoroguanosine-3'-phosphate
  modified_base 10: mod_base = OTHER; note = 2'-deoxy-2'-fluoroadenosine-3'-phosphate
  modified_base 11: mod_base = OTHER; note = 2'-deoxy-2'-fluorocytidine-3'-phosphate
  modified_base 12: mod_base = OTHER; note = 2'-O-methylguanosine-3'-phosphate
  modified_base 13: mod_base = OTHER; note = 2'-O-methylcytidine-3'-phosphate
  modified_base 14: mod_base = OTHER; note = 2'-O-methyladenosine-3'-phosphate
  modified_base 15: mod_base = OTHER; note = 2'-O-methylguanosine-3'-phosphate
  modified_base 16: mod_base = OTHER; note = 2'-O-methylcytidine-3'-phosphate
  modified_base 17: mod_base = OTHER; note = 2'-O-methylcytidine-3'-phosphate
  modified_base 18: mod_base = OTHER; note = 2'-O-methyluridine-3'-phosphate
  modified_base 19: mod_base = OTHER; note = 2'-O-methylguanosine-3'-phosphate
  modified_base 20: mod_base = OTHER; note = 2'-O-methyladenosine-3'-phosphate
  modified_base 21: mod_base = OTHER; note = 2'-O-methyluridine-3'-phosphate ((2S,4R)-1-[29-[[2-(acetylamino)-2-deoxy-beta-D-galactopyra nosyl]oxy]-14,14-bis[[3-[[3-[[5-[[2-(acetylamino)-2-deoxy-b eta-D-galactopyranosyl]oxy]-1-oxopentyl]amino]propyl]amino] -3-oxopropoxy]methyl]-1,12,19,25-tetraoxo-16-oxa-13,20,24-t riazanonacos-1-yl]-4-hydroxy-2-pyrrolidinyl)methyl ester
ttcaaccagacgcagcctgat

SEQ ID NO: 245 - RNA, 21 nt, synthetic construct
  source 1..21: mol_type = other RNA
  modified_base 1: mod_base = OTHER; note = 2'-O-methylcytidine-3'-phosphorothioate
  modified_base 2: mod_base = OTHER; note = 2'-O-methylguanosine-3'-phosphorothioate
  modified_base 3: mod_base = OTHER; note = 2'-O-methyladenosine-3'-phosphate
  modified_base 4: mod_base = OTHER; note = 2'-O-methylcytidine-3'-phosphate
  modified_base 5: mod_base = OTHER; note = 2'-O-methyladenosine-3'-phosphate
  modified_base 6: mod_base = OTHER; note = 2'-O-methyladenosine-3'-phosphate
  modified_base 7: mod_base = OTHER; note = 2'-deoxy-2'-fluorocytidine-3'-phosphate
  modified_base 8: mod_base = OTHER; note = 2'-O-methyladenosine-3'-phosphate
  modified_base 9: mod_base = OTHER; note = 2'-deoxy-2'-fluoroadenosine-3'-phosphate
  modified_base 10: mod_base = OTHER; note = 2'-deoxy-2'-fluorocytidine-3'-phosphate
  modified_base 11: mod_base = OTHER; note = 2'-deoxy-2'-fluorocytidine-3'-phosphate
  modified_base 12: mod_base = OTHER; note = 2'-O-methyluridine-3'-phosphate
  modified_base 13: mod_base = OTHER; note = 2'-O-methylcytidine-3'-phosphate
  modified_base 14: mod_base = OTHER; note = 2'-O-methyladenosine-3'-phosphate
  modified_base 15: mod_base = OTHER; note = 2'-O-methylcytidine-3'-phosphate
  modified_base 16: mod_base = OTHER; note = 2'-O-methylcytidine-3'-phosphate
  modified_base 17: mod_base = OTHER; note = 2'-O-methyladenosine-3'-phosphate
  modified_base 18: mod_base = OTHER; note = 2'-O-methylguanosine-3'-phosphate
  modified_base 19: mod_base = OTHER; note = 2'-O-methylguanosine-3'-phosphate
  modified_base 20: mod_base = OTHER; note = 2'-O-methyladenosine-3'-phosphate
  modified_base 21: mod_base = OTHER; note = 2'-O-methyluridine-3'-phosphate ((2S,4R)-1-[29-[[2-(acetylamino)-2-deoxy-beta-D-galactopyra nosyl]oxy]-14,14-bis[[3-[[3-[[5-[[2-(acetylamino)-2-deoxy-b eta-D-galactopyranosyl]oxy]-1-oxopentyl]amino]propyl]amino] -3-oxopropoxy]methyl]-1,12,19,25-tetraoxo-16-oxa-13,20,24-t riazanonacos-1-yl]-4-hydroxy-2-pyrrolidinyl)methyl ester
cgacaacaacctcaccaggat

SEQ ID NO: 246 - RNA, 21 nt, synthetic construct
  source 1..21: mol_type = other RNA
  modified_base 1: mod_base = OTHER; note = 2'-O-methylcytidine-3'-phosphorothioate
  modified_base 2: mod_base = OTHER; note = 2'-O-methylcytidine-3'-phosphorothioate
  modified_base 3: mod_base = OTHER; note = 2'-O-methyluridine-3'-phosphate
  modified_base 4: mod_base = OTHER; note = 2'-O-methylcytidine-3'-phosphate
  modified_base 5: mod_base = OTHER; note = 2'-O-methyladenosine-3'-phosphate
  modified_base 6: mod_base = OTHER; note = 2'-O-methylcytidine-3'-phosphate
  modified_base 7: mod_base = OTHER; note = 2'-deoxy-2'-fluorocytidine-3'-phosphate
  modified_base 8: mod_base = OTHER; note = 2'-O-methyladenosine-3'-phosphate
  modified_base 9: mod_base = OTHER; note = 2'-deoxy-2'-fluoroguanosine-3'-phosphate
  modified_base 10: mod_base = OTHER; note = 2'-deoxy-2'-fluoroguanosine-3'-phosphate
  modified_base 11: mod_base = OTHER; note = 2'-deoxy-2'-fluoroadenosine-3'-phosphate
  modified_base 12: mod_base = OTHER; note = 2'-O-methyluridine-3'-phosphate
  modified_base 13: mod_base = OTHER; note = 2'-O-methylcytidine-3'-phosphate
  modified_base 14: mod_base = OTHER; note = 2'-O-methylguanosine-3'-phosphate
  modified_base 15: mod_base = OTHER; note = 2'-O-methyluridine-3'-phosphate
  modified_base 16: mod_base = OTHER; note = 2'-O-methylguanosine-3'-phosphate
  modified_base 17: mod_base = OTHER; note = 2'-O-methylguanosine-3'-phosphate
  modified_base 18: mod_base = OTHER; note = 2'-O-methylguanosine-3'-phosphate
  modified_base 19: mod_base = OTHER; note = 2'-O-methyladenosine-3'-phosphate
  modified_base 20: mod_base = OTHER; note = 2'-O-methylguanosine-3'-phosphate
  modified_base 21: mod_base = OTHER; note = 2'-O-methyluridine-3'-phosphate ((2S,4R)-1-[29-[[2-(acetylamino)-2-deoxy-beta-D-galactopyra nosyl]oxy]-14,14-bis[[3-[[3-[[5-[[2-(acetylamino)-2-deoxy-b eta-D-galactopyranosyl]oxy]-1-oxopentyl]amino]propyl]amino] -3-oxopropoxy]methyl]-1,12,19,25-tetraoxo-16-oxa-13,20,24-t riazanonacos-1-yl]-4-hydroxy-2-pyrrolidinyl)methyl ester
cctcaccaggatcgtgggagt

SEQ ID NO: 247 - RNA, 21 nt, synthetic construct
  source 1..21: mol_type = other RNA
  modified_base 1: mod_base = OTHER; note = 2'-O-methyladenosine-3'-phosphorothioate
  modified_base 2: mod_base = OTHER; note = 2'-O-methylguanosine-3'-phosphorothioate
  modified_base 3: mod_base = OTHER; note = 2'-O-methylguanosine-3'-phosphate
  modified_base 4: mod_base = OTHER; note = 2'-O-methylcytidine-3'-phosphate
  modified_base 5: mod_base = OTHER; note = 2'-O-methylcytidine-3'-phosphate
  modified_base 6: mod_base = OTHER; note = 2'-O-methyladenosine-3'-phosphate
  modified_base 7: mod_base = OTHER; note = 2'-deoxy-2'-fluoroguanosine-3'-phosphate
  modified_base 8: mod_base = OTHER; note = 2'-O-methylguanosine-3'-phosphate
  modified_base 9: mod_base = OTHER; note = 2'-deoxy-2'-fluoroadenosine-3'-phosphate
  modified_base 10: mod_base = OTHER; note = 2'-deoxy-2'-fluoroadenosine-3'-phosphate
  modified_base 11: mod_base = OTHER; note = 2'-deoxy-2'-fluorouridine-3'-phosphate
  modified_base 12: mod_base = OTHER; note = 2'-O-methylguanosine-3'-phosphate
  modified_base 13: mod_base = OTHER; note = 2'-O-methylcytidine-3'-phosphate
  modified_base 14: mod_base = OTHER; note = 2'-O-methyladenosine-3'-phosphate
  modified_base 15: mod_base = OTHER; note = 2'-O-methyladenosine-3'-phosphate
  modified_base 16: mod_base = OTHER; note = 2'-O-methylguanosine-3'-phosphate
  modified_base 17: mod_base = OTHER; note = 2'-O-methylguanosine-3'-phosphate
  modified_base 18: mod_base = OTHER; note = 2'-O-methyladenosine-3'-phosphate
  modified_base 19: mod_base = OTHER; note = 2'-O-methylcytidine-3'-phosphate
  modified_base 20: mod_base = OTHER; note = 2'-O-methylguanosine-3'-phosphate
  modified_base 21: mod_base = OTHER; note = 2'-O-methyluridine-3'-phosphate ((2S,4R)-1-[29-[[2-(acetylamino)-2-deoxy-beta-D-galactopyra nosyl]oxy]-14,14-bis[[3-[[3-[[5-[[2-(acetylamino)-2-deoxy-b eta-D-galactopyranosyl]oxy]-1-oxopentyl]amino]propyl]amino] -3-oxopropoxy]methyl]-1,12,19,25-tetraoxo-16-oxa-13,20,24-t riazanonacos-1-yl]-4-hydroxy-2-pyrrolidinyl)methyl ester
aggccaggaatgcaaggacgt

SEQ ID NO: 248 - RNA, 21 nt, synthetic construct
  source 1..21: mol_type = other RNA
  modified_base 1: mod_base = OTHER; note = 2'-O-methyluridine-3'-phosphorothioate
  modified_base 2: mod_base = OTHER; note = 2'-O-methylguanosine-3'-phosphorothioate
  modified_base 3: mod_base = OTHER; note = 2'-O-methylguanosine-3'-phosphate
  modified_base 4: mod_base = OTHER; note = 2'-O-methylcytidine-3'-phosphate
  modified_base 5: mod_base = OTHER; note = 2'-O-methyladenosine-3'-phosphate
  modified_base 6: mod_base = OTHER; note = 2'-O-methylguanosine-3'-phosphate
  modified_base 7: mod_base = OTHER; note = 2'-deoxy-2'-fluoroguanosine-3'-phosphate
  modified_base 8: mod_base = OTHER; note = 2'-O-methylcytidine-3'-phosphate
  modified_base 9: mod_base = OTHER; note = 2'-deoxy-2'-fluorocytidine-3'-phosphate
  modified_base 10: mod_base = OTHER; note = 2'-deoxy-2'-fluorocytidine-3'-phosphate
  modified_base 11: mod_base = OTHER; note = 2'-deoxy-2'-fluorouridine-3'-phosphate
  modified_base 12: mod_base = OTHER; note = 2'-O-methylguanosine-3'-phosphate
  modified_base 13: mod_base = OTHER; note = 2'-O-methylcytidine-3'-phosphate
  modified_base 14: mod_base = OTHER; note = 2'-O-methyluridine-3'-phosphate
  modified_base 15: mod_base = OTHER; note = 2'-O-methylcytidine-3'-phosphate
  modified_base 16: mod_base = OTHER; note = 2'-O-methyladenosine-3'-phosphate
  modified_base 17: mod_base = OTHER; note = 2'-O-methyluridine-3'-phosphate
  modified_base 18: mod_base = OTHER; note = 2'-O-methylcytidine-3'-phosphate
  modified_base 19: mod_base = OTHER; note = 2'-O-methyladenosine-3'-phosphate
  modified_base 20: mod_base = OTHER; note = 2'-O-methyladenosine-3'-phosphate
  modified_base 21: mod_base = OTHER; note = 2'-O-methyluridine-3'-phosphate ((2S,4R)-1-[29-[[2-(acetylamino)-2-deoxy-beta-D-galactopyra nosyl]oxy]-14,14-bis[[3-[[3-[[5-[[2-(acetylamino)-2-deoxy-b eta-D-galactopyranosyl]oxy]-1-oxopentyl]amino]propyl]amino] -3-oxopropoxy]methyl]-1,12,19,25-tetraoxo-16-oxa-13,20,24-t riazanonacos-1-yl]-4-hydroxy-2-pyrrolidinyl)methyl ester
tggcaggccctgctcatcaat

SEQ ID NO: 249 - RNA, 21 nt, synthetic construct
  source 1..21: mol_type = other RNA
  modified_base 1: mod_base = OTHER; note = 2'-O-methylcytidine-3'-phosphorothioate
  modified_base 2: mod_base = OTHER; note = 2'-O-methyluridine-3'-phosphorothioate
  modified_base 3: mod_base = OTHER; note = 2'-O-methylguanosine-3'-phosphate
  modified_base 4: mod_base = OTHER; note = 2'-O-methylcytidine-3'-phosphate
  modified_base 5: mod_base = OTHER; note = 2'-O-methyluridine-3'-phosphate
  modified_base 6: mod_base = OTHER; note = 2'-O-methylcytidine-3'-phosphate
  modified_base 7: mod_base = OTHER; note = 2'-deoxy-2'-fluoroadenosine-3'-phosphate
  modified_base 8: mod_base = OTHER; note = 2'-O-methyluridine-3'-phosphate
  modified_base 9: mod_base = OTHER; note = 2'-deoxy-2'-fluorocytidine-3'-phosphate
  modified_base 10: mod_base = OTHER; note = 2'-deoxy-2'-fluoroadenosine-3'-phosphate
  modified_base 11: mod_base = OTHER; note = 2'-deoxy-2'-fluoroadenosine-3'-phosphate
  modified_base 12: mod_base = OTHER; note = 2'-O-methyluridine-3'-phosphate
  modified_base 13: mod_base = OTHER; note = 2'-O-methylguanosine-3'-phosphate
  modified_base 14: mod_base = OTHER; note = 2'-O-methyladenosine-3'-phosphate
  modified_base 15: mod_base = OTHER; note = 2'-O-methylguanosine-3'-phosphate
  modified_base 16: mod_base = OTHER; note = 2'-O-methylguanosine-3'-phosphate
  modified_base 17: mod_base = OTHER; note = 2'-O-methyladenosine-3'-phosphate
  modified_base 18: mod_base = OTHER; note = 2'-O-methyladenosine-3'-phosphate
  modified_base 19: mod_base = OTHER; note = 2'-O-methyladenosine-3'-phosphate
  modified_base 20: mod_base = OTHER; note = 2'-O-methyladenosine-3'-phosphate
  modified_base 21: mod_base = OTHER; note = 2'-O-methyluridine-3'-phosphate ((2S,4R)-1-[29-[[2-(acetylamino)-2-deoxy-beta-D-galactopyra nosyl]oxy]-14,14-bis[[3-[[3-[[5-[[2-(acetylamino)-2-deoxy-b eta-D-galactopyranosyl]oxy]-1-oxopentyl]amino]propyl]amino] -3-oxopropoxy]methyl]-1,12,19,25-tetraoxo-16-oxa-13,20,24-t riazanonacos-1-yl]-4-hydroxy-2-pyrrolidinyl)methyl ester
ctgctcatcaatgaggaaaat

SEQ ID NO: 250 - RNA, 21 nt, synthetic construct
  source 1..21: mol_type = other RNA
  modified_base 1: mod_base = OTHER; note = 2'-O-methyladenosine-3'-phosphorothioate
  modified_base 2: mod_base = OTHER; note = 2'-O-methyladenosine-3'-phosphorothioate
  modified_base 3: mod_base = OTHER; note = 2'-O-methyluridine-3'-phosphate
  modified_base 4: mod_base = OTHER; note = 2'-O-methylguanosine-3'-phosphate
  modified_base 5: mod_base = OTHER; note = 2'-O-methyladenosine-3'-phosphate
  modified_base 6: mod_base = OTHER; note = 2'-O-methylguanosine-3'-phosphate
  modified_base 7: mod_base = OTHER; note = 2'-deoxy-2'-fluoroguanosine-3'-phosphate
  modified_base 8: mod_base = OTHER; note = 2'-O-methyladenosine-3'-phosphate
  modified_base 9: mod_base = OTHER; note = 2'-deoxy-2'-fluoroadenosine-3'-phosphate
  modified_base 10: mod_base = OTHER; note = 2'-deoxy-2'-fluoroadenosine-3'-phosphate
  modified_base 11: mod_base = OTHER; note = 2'-deoxy-2'-fluoroadenosine-3'-phosphate
  modified_base 12: mod_base = OTHER; note = 2'-O-methylcytidine-3'-phosphate
  modified_base 13: mod_base = OTHER; note = 2'-O-methylguanosine-3'-phosphate
  modified_base 14: mod_base = OTHER; note = 2'-O-methyladenosine-3'-phosphate
  modified_base 15: mod_base = OTHER; note = 2'-O-methylguanosine-3'-phosphate
  modified_base 16: mod_base = OTHER; note = 2'-O-methylguanosine-3'-phosphate
  modified_base 17: mod_base = OTHER; note = 2'-O-methylguanosine-3'-phosphate
  modified_base 18: mod_base = OTHER; note = 2'-O-methyluridine-3'-phosphate
  modified_base 19: mod_base = OTHER; note = 2'-O-methyluridine-3'-phosphate
  modified_base 20: mod_base = OTHER; note = 2'-O-methyluridine-3'-phosphate
  modified_base 21: mod_base = OTHER; note = 2'-O-methyluridine-3'-phosphate ((2S,4R)-1-[29-[[2-(acetylamino)-2-deoxy-beta-D-galactopyra nosyl]oxy]-14,14-bis[[3-[[3-[[5-[[2-(acetylamino)-2-deoxy-b eta-D-galactopyranosyl]oxy]-1-oxopentyl]amino]propyl]amino] -3-oxopropoxy]methyl]-1,12,19,25-tetraoxo-16-oxa-13,20,24-t riazanonacos-1-yl]-4-hydroxy-2-pyrrolidinyl)methyl ester
aatgaggaaaacgagggtttt

SEQ ID NO: 251 - RNA, 21 nt, synthetic construct
  source 1..21: mol_type = other RNA
  modified_base 1: mod_base = OTHER; note = 2'-O-methyladenosine-3'-phosphorothioate
  modified_base 2: mod_base = OTHER; note = 2'-O-methyladenosine-3'-phosphorothioate
  modified_base 3: mod_base = OTHER; note = 2'-O-methylcytidine-3'-phosphate
  modified_base 4: mod_base = OTHER; note = 2'-O-methylguanosine-3'-phosphate
  modified_base 5: mod_base = OTHER; note = 2'-O-methyladenosine-3'-phosphate
  modified_base 6: mod_base = OTHER; note = 2'-O-methylguanosine-3'-phosphate
  modified_base 7: mod_base = OTHER; note = 2'-deoxy-2'-fluoroguanosine-3'-phosphate
  modified_base 8: mod_base = OTHER; note = 2'-O-methylguanosine-3'-phosphate
  modified_base 9: mod_base = OTHER; note = 2'-deoxy-2'-fluorouridine-3'-phosphate
  modified_base 10: mod_base = OTHER; note = 2'-deoxy-2'-fluorouridine-3'-phosphate
  modified_base 11: mod_base = OTHER; note = 2'-deoxy-2'-fluorouridine-3'-phosphate
  modified_base 12: mod_base = OTHER; note = 2'-O-methylcytidine-3'-phosphate
  modified_base 13: mod_base = OTHER; note = 2'-O-methyluridine-3'-phosphate
  modified_base 14: mod_base = OTHER; note = 2'-O-methylguanosine-3'-phosphate
  modified_base 15: mod_base = OTHER; note = 2'-O-methyluridine-3'-phosphate
  modified_base 16: mod_base = OTHER; note = 2'-O-methylguanosine-3'-phosphate
  modified_base 17: mod_base = OTHER; note = 2'-O-methylguanosine-3'-phosphate
  modified_base 18: mod_base = OTHER; note = 2'-O-methyluridine-3'-phosphate
  modified_base 19: mod_base = OTHER; note = 2'-O-methylguanosine-3'-phosphate
  modified_base 20: mod_base = OTHER; note = 2'-O-methylguanosine-3'-phosphate
  modified_base 21: mod_base = OTHER; note = 2'-O-methyluridine-3'-phosphate ((2S,4R)-1-[29-[[2-(acetylamino)-2-deoxy-beta-D-galactopyra nosyl]oxy]-14,14-bis[[3-[[3-[[5-[[2-(acetylamino)-2-deoxy-b eta-D-galactopyranosyl]oxy]-1-oxopentyl]amino]propyl]amino] -3-oxopropoxy]methyl]-1,12,19,25-tetraoxo-16-oxa-13,20,24-t riazanonacos-1-yl]-4-hydroxy-2-pyrrolidinyl)methyl ester
aacgagggtttctgtggtggt

SEQ ID NO: 252 - RNA, 21 nt, synthetic construct
  source 1..21: mol_type = other RNA
  modified_base 1: mod_base = OTHER; note = 2'-O-methyluridine-3'-phosphorothioate
  modified_base 2: mod_base = OTHER; note = 2'-O-methyluridine-3'-phosphorothioate
  modified_base 3: mod_base = OTHER; note = 2'-O-methylcytidine-3'-phosphate
  modified_base 4: mod_base = OTHER; note = 2'-O-methyluridine-3'-phosphate
  modified_base 5: mod_base = OTHER; note = 2'-O-methylguanosine-3'-phosphate
  modified_base 6: mod_base = OTHER; note = 2'-O-methyluridine-3'-phosphate
  modified_base 7: mod_base = OTHER; note = 2'-deoxy-2'-fluoroguanosine-3'-phosphate
  modified_base 8: mod_base = OTHER; note = 2'-O-methylguanosine-3'-phosphate
  modified_base 9: mod_base = OTHER; note = 2'-deoxy-2'-fluorouridine-3'-phosphate
  modified_base 10: mod_base = OTHER; note = 2'-deoxy-2'-fluoroguanosine-3'-phosphate
  modified_base 11: mod_base = OTHER; note = 2'-deoxy-2'-fluoroguanosine-3'-phosphate
  modified_base 12: mod_base = OTHER; note = 2'-O-methyladenosine-3'-phosphate
  modified_base 13: mod_base = OTHER; note = 2'-O-methyladenosine-3'-phosphate
  modified_base 14: mod_base = OTHER; note = 2'-O-methylcytidine-3'-phosphate
  modified_base 15: mod_base = OTHER; note = 2'-O-methylcytidine-3'-phosphate
  modified_base 16: mod_base = OTHER; note = 2'-O-methyladenosine-3'-phosphate
  modified_base 17: mod_base = OTHER; note = 2'-O-methyluridine-3'-phosphate
  modified_base 18: mod_base = OTHER; note = 2'-O-methyluridine-3'-phosphate
  modified_base 19: mod_base = OTHER; note = 2'-O-methylcytidine-3'-phosphate
  modified_base 20: mod_base = OTHER; note = 2'-O-methyluridine-3'-phosphate
  modified_base 21: mod_base = OTHER; note = 2'-O-methyluridine-3'-phosphate ((2S,4R)-1-[29-[[2-(acetylamino)-2-deoxy-beta-D-galactopyra nosyl]oxy]-14,14-bis[[3-[[3-[[5-[[2-(acetylamino)-2-deoxy-b eta-D-galactopyranosyl]oxy]-1-oxopentyl]amino]propyl]amino] -3-oxopropoxy]methyl]-1,12,19,25-tetraoxo-16-oxa-13,20,24-t riazanonacos-1-yl]-4-hydroxy-2-pyrrolidinyl)methyl ester
ttctgtggtggaaccattctt

SEQ ID NO: 253 - RNA, 21 nt, synthetic construct
  source 1..21: mol_type = other RNA
  modified_base 1: mod_base = OTHER; note = 2'-O-methyladenosine-3'-phosphorothioate
  modified_base 2: mod_base = OTHER; note = 2'-O-methyladenosine-3'-phosphorothioate
  modified_base 3: mod_base = OTHER; note = 2'-O-methylcytidine-3'-phosphate
  modified_base 4: mod_base = OTHER; note = 2'-O-methylcytidine-3'-phosphate
  modified_base 5: mod_base = OTHER; note = 2'-O-methyladenosine-3'-phosphate
  modified_base 6: mod_base = OTHER; note = 2'-O-methyluridine-3'-phosphate
  modified_base 7: mod_base = OTHER; note = 2'-deoxy-2'-fluorouridine-3'-phosphate
  modified_base 8: mod_base = OTHER; note = 2'-O-methylcytidine-3'-phosphate
  modified_base 9: mod_base = OTHER; note = 2'-deoxy-2'-fluorouridine-3'-phosphate
  modified_base 10: mod_base = OTHER; note = 2'-deoxy-2'-fluoroguanosine-3'-phosphate
  modified_base 11: mod_base = OTHER; note = 2'-deoxy-2'-fluoroadenosine-3'-phosphate
  modified_base 12: mod_base = OTHER; note = 2'-O-methylguanosine-3'-phosphate
  modified_base 13: mod_base = OTHER; note = 2'-O-methylcytidine-3'-phosphate
  modified_base 14: mod_base = OTHER; note = 2'-O-methylguanosine-3'-phosphate
  modified_base 15: mod_base = OTHER; note = 2'-O-methyladenosine-3'-phosphate
  modified_base 16: mod_base = OTHER; note = 2'-O-methylguanosine-3'-phosphate
  modified_base 17: mod_base = OTHER; note = 2'-O-methyluridine-3'-phosphate
  modified_base 18: mod_base = OTHER; note = 2'-O-methyluridine-3'-phosphate
  modified_base 19: mod_base = OTHER; note = 2'-O-methylcytidine-3'-phosphate
  modified_base 20: mod_base = OTHER; note = 2'-O-methyluridine-3'-phosphate
  modified_base 21: mod_base = OTHER; note = 2'-O-methyluridine-3'-phosphate ((2S,4R)-1-[29-[[2-(acetylamino)-2-deoxy-beta-D-galactopyra nosyl]oxy]-14,14-bis[[3-[[3-[[5-[[2-(acetylamino)-2-deoxy-b eta-D-galactopyranosyl]oxy]-1-oxopentyl]amino]propyl]amino] -3-oxopropoxy]methyl]-1,12,19,25-tetraoxo-16-oxa-13,20,24-t riazanonacos-1-yl]-4-hydroxy-2-pyrrolidinyl)methyl ester
aaccattctgagcgagttctt

SEQ ID NO: 254 - RNA, 21 nt, synthetic construct
  source 1..21: mol_type = other RNA
  modified_base 1: mod_base = OTHER; note = 2'-O-methylguanosine-3'-phosphorothioate
  modified_base 2: mod_base = OTHER; note = 2'-O-methyladenosine-3'-phosphorothioate
  modified_base 3: mod_base = OTHER; note = 2'-O-methylguanosine-3'-phosphate
  modified_base 4: mod_base = OTHER; note = 2'-O-methylcytidine-3'-phosphate
  modified_base 5: mod_base = OTHER; note = 2'-O-methylguanosine-3'-phosphate
  modified_base 6: mod_base = OTHER; note = 2'-O-methyladenosine-3'-phosphate
  modified_base 7: mod_base = OTHER; note = 2'-deoxy-2'-fluoroguanosine-3'-phosphate
  modified_base 8: mod_base = OTHER; note = 2'-O-methyluridine-3'-phosphate
  modified_base 9: mod_base = OTHER; note = 2'-deoxy-2'-fluorouridine-3'-phosphate
  modified_base 10: mod_base = OTHER; note = 2'-deoxy-2'-fluorocytidine-3'-phosphate
  modified_base 11: mod_base = OTHER; note = 2'-deoxy-2'-fluorouridine-3'-phosphate
  modified_base 12: mod_base = OTHER; note = 2'-O-methyladenosine-3'-phosphate
  modified_base 13: mod_base = OTHER; note = 2'-O-methylcytidine-3'-phosphate
  modified_base 14: mod_base = OTHER; note = 2'-O-methyladenosine-3'-phosphate
  modified_base 15: mod_base = OTHER; note = 2'-O-methyluridine-3'-phosphate
  modified_base 16: mod_base = OTHER; note = 2'-O-methylcytidine-3'-phosphate
  modified_base 17: mod_base = OTHER; note = 2'-O-methylcytidine-3'-phosphate
  modified_base 18: mod_base = OTHER; note = 2'-O-methyluridine-3'-phosphate
  modified_base 19: mod_base = OTHER; note = 2'-O-methyladenosine-3'-phosphate
  modified_base 20: mod_base = OTHER; note = 2'-O-methyladenosine-3'-phosphate
  modified_base 21: mod_base = OTHER; note = 2'-O-methyluridine-3'-phosphate ((2S,4R)-1-[29-[[2-(acetylamino)-2-deoxy-beta-D-galactopyra nosyl]oxy]-14,14-bis[[3-[[3-[[5-[[2-(acetylamino)-2-deoxy-b eta-D-galactopyranosyl]oxy]-1-oxopentyl]amino]propyl]amino] -3-oxopropoxy]methyl]-1,12,19,25-tetraoxo-16-oxa-13,20,24-t riazanonacos-1-yl]-4-hydroxy-2-pyrrolidinyl)methyl ester
gagcgagttctacatcctaat

SEQ ID NO: 255 - RNA, 21 nt, synthetic construct
  source 1..21: mol_type = other RNA
  modified_base 1: mod_base = OTHER; note = 2'-O-methylcytidine-3'-phosphorothioate
  modified_base 2: mod_base = OTHER; note = 2'-O-methyluridine-3'-phosphorothioate
  modified_base 3: mod_base = OTHER; note = 2'-O-methyladenosine-3'-phosphate
  modified_base 4: mod_base = OTHER; note = 2'-O-methylcytidine-3'-phosphate
  modified_base 5: mod_base = OTHER; note = 2'-O-methyladenosine-3'-phosphate
  modified_base 6: mod_base = OTHER; note = 2'-O-methyluridine-3'-phosphate
  modified_base 7: mod_base = OTHER; note = 2'-deoxy-2'-fluorocytidine-3'-phosphate
  modified_base 8: mod_base = OTHER; note = 2'-O-methylcytidine-3'-phosphate
  modified_base 9: mod_base = OTHER; note = 2'-deoxy-2'-fluorouridine-3'-phosphate
  modified_base 10: mod_base = OTHER; note = 2'-deoxy-2'-fluoroadenosine-3'-phosphate
  modified_base 11: mod_base = OTHER; note = 2'-deoxy-2'-fluoroadenosine-3'-phosphate
  modified_base 12: mod_base = OTHER; note = 2'-O-methylcytidine-3'-phosphate
  modified_base 13: mod_base = OTHER; note = 2'-O-methylguanosine-3'-phosphate
  modified_base 14: mod_base = OTHER; note = 2'-O-methylguanosine-3'-phosphate
  modified_base 15: mod_base = OTHER; note = 2'-O-methylcytidine-3'-phosphate
  modified_base 16: mod_base = OTHER; note = 2'-O-methyladenosine-3'-phosphate
  modified_base 17: mod_base = OTHER; note = 2'-O-methylguanosine-3'-phosphate
  modified_base 18: mod_base = OTHER; note = 2'-O-methylcytidine-3'-phosphate
  modified_base 19: mod_base = OTHER; note = 2'-O-methylcytidine-3'-phosphate
  modified_base 20: mod_base = OTHER; note = 2'-O-methylcytidine-3'-phosphate
  modified_base 21: mod_base = OTHER; note = 2'-O-methyluridine-3'-phosphate ((2S,4R)-1-[29-[[2-(acetylamino)-2-deoxy-beta-D-galactopyra nosyl]oxy]-14,14-bis[[3-[[3-[[5-[[2-(acetylamino)-2-deoxy-b eta-D-galactopyranosyl]oxy]-1-oxopentyl]amino]propyl]amino] -3-oxopropoxy]methyl]-1,12,19,25-tetraoxo-16-oxa-13,20,24-t riazanonacos-1-yl]-4-hydroxy-2-pyrrolidinyl)methyl ester
ctacatcctaacggcagccct

SEQ ID NO: 256 - RNA, 21 nt, synthetic construct
  source 1..21: mol_type = other RNA
  modified_base 1: mod_base = OTHER; note = 2'-O-methyladenosine-3'-phosphorothioate
  modified_base 2: mod_base = OTHER; note = 2'-O-methyladenosine-3'-phosphorothioate
  modified_base 3: mod_base = OTHER; note = 2'-O-methylcytidine-3'-phosphate
  modified_base 4: mod_base = OTHER; note = 2'-O-methylguanosine-3'-phosphate
  modified_base 5: mod_base = OTHER; note = 2'-O-methylguanosine-3'-phosphate
  modified_base 6: mod_base = OTHER; note = 2'-O-methylcytidine-3'-phosphate
  modified_base 7: mod_base = OTHER; note = 2'-deoxy-2'-fluoroadenosine-3'-phosphate
  modified_base 8: mod_base = OTHER; note = 2'-O-methylguanosine-3'-phosphate
  modified_base 9: mod_base = OTHER; note = 2'-deoxy-2'-fluorocytidine-3'-phosphate
  modified_base 10: mod_base = OTHER; note = 2'-deoxy-2'-fluorocytidine-3'-phosphate
  modified_base 11: mod_base = OTHER; note = 2'-deoxy-2'-fluorocytidine-3'-phosphate
  modified_base 12: mod_base = OTHER; note = 2'-O-methyladenosine-3'-phosphate
  modified_base 13: mod_base = OTHER; note = 2'-O-methylcytidine-3'-phosphate
  modified_base 14: mod_base = OTHER; note = 2'-O-methyluridine-3'-phosphate
  modified_base 15: mod_base = OTHER; note = 2'-O-methylguanosine-3'-phosphate
  modified_base 16: mod_base = OTHER; note = 2'-O-methyluridine-3'-phosphate
  modified_base 17: mod_base = OTHER; note = 2'-O-methylcytidine-3'-phosphate
  modified_base 18: mod_base = OTHER; note = 2'-O-methyluridine-3'-phosphate
  modified_base 19: mod_base = OTHER; note = 2'-O-methylcytidine-3'-phosphate
  modified_base 20: mod_base = OTHER; note = 2'-O-methyluridine-3'-phosphate
  modified_base 21: mod_base = OTHER; note = 2'-O-methyluridine-3'-phosphate ((2S,4R)-1-[29-[[2-(acetylamino)-2-deoxy-beta-D-galactopyra nosyl]oxy]-14,14-bis[[3-[[3-[[5-[[2-(acetylamino)-2-deoxy-b eta-D-galactopyranosyl]oxy]-1-oxopentyl]amino]propyl]amino] -3-oxopropoxy]methyl]-1,12,19,25-tetraoxo-16-oxa-13,20,24-t riazanonacos-1-yl]-4-hydroxy-2-pyrrolidinyl)methyl ester
aacggcagcccactgtctctt

SEQ ID NO: 257 - RNA, 21 nt, synthetic construct
  source 1..21: mol_type = other RNA
  modified_base 1: mod_base = OTHER; note = 2'-O-methylcytidine-3'-phosphorothioate
  modified_base 2: mod_base = OTHER; note = 2'-O-methylcytidine-3'-phosphorothioate
  modified_base 3: mod_base = OTHER; note = 2'-O-methyladenosine-3'-phosphate
  modified_base 4: mod_base = OTHER; note = 2'-O-methylcytidine-3'-phosphate
  modified_base 5: mod_base = OTHER; note = 2'-O-methyluridine-3'-phosphate
  modified_base 6: mod_base = OTHER; note = 2'-O-methylguanosine-3'-phosphate
  modified_base 7: mod_base = OTHER; note = 2'-deoxy-2'-fluorouridine-3'-phosphate
  modified_base 8: mod_base = OTHER; note = 2'-O-methylcytidine-3'-phosphate
  modified_base 9: mod_base = OTHER; note = 2'-deoxy-2'-fluorouridine-3'-phosphate
  modified_base 10: mod_base = OTHER; note = 2'-deoxy-2'-fluorocytidine-3'-phosphate
  modified_base 11: mod_base = OTHER; note = 2'-deoxy-2'-fluorouridine-3'-phosphate
  modified_base 12: mod_base = OTHER; note = 2'-O-methyladenosine-3'-phosphate
  modified_base 13: mod_base = OTHER; note = 2'-O-methylcytidine-3'-phosphate
  modified_base 14: mod_base = OTHER; note = 2'-O-methylcytidine-3'-phosphate
  modified_base 15: mod_base = OTHER; note = 2'-O-methyladenosine-3'-phosphate
  modified_base 16: mod_base = OTHER; note = 2'-O-methyladenosine-3'-phosphate
  modified_base 17: mod_base = OTHER; note = 2'-O-methylguanosine-3'-phosphate
  modified_base 18: mod_base = OTHER; note = 2'-O-methylcytidine-3'-phosphate
  modified_base 19: mod_base = OTHER; note = 2'-O-methylcytidine-3'-phosphate
  modified_base 20: mod_base = OTHER; note = 2'-O-methyladenosine-3'-phosphate
  modified_base 21: mod_base = OTHER; note = 2'-O-methyluridine-3'-phosphate ((2S,4R)-1-[29-[[2-(acetylamino)-2-deoxy-beta-D-galactopyra nosyl]oxy]-14,14-bis[[3-[[3-[[5-[[2-(acetylamino)-2-deoxy-b eta-D-galactopyranosyl]oxy]-1-oxopentyl]amino]propyl]amino] -3-oxopropoxy]methyl]-1,12,19,25-tetraoxo-16-oxa-13,20,24-t riazanonacos-1-yl]-4-hydroxy-2-pyrrolidinyl)methyl ester
ccactgtctctaccaagccat

SEQ ID NO: 258 - RNA, 21 nt, synthetic construct
  source 1..21: mol_type = other RNA
  modified_base 1: mod_base = OTHER; note = 2'-O-methyluridine-3'-phosphorothioate
  modified_base 2: mod_base = OTHER; note = 2'-O-methyladenosine-3'-phosphorothioate
  modified_base 3: mod_base = OTHER; note = 2'-O-methylcytidine-3'-phosphate
  modified_base 4: mod_base = OTHER; note = 2'-O-methylcytidine-3'-phosphate
  modified_base 5: mod_base = OTHER; note = 2'-O-methyladenosine-3'-phosphate
  modified_base 6: mod_base = OTHER; note = 2'-O-methyladenosine-3'-phosphate
  modified_base 7: mod_base = OTHER; note = 2'-deoxy-2'-fluoroguanosine-3'-phosphate
  modified_base 8: mod_base = OTHER; note = 2'-O-methylcytidine-3'-phosphate
  modified_base 9: mod_base = OTHER; note = 2'-deoxy-2'-fluorocytidine-3'-phosphate
  modified_base 10: mod_base = OTHER; note = 2'-deoxy-2'-fluoroadenosine-3'-phosphate
  modified_base 11: mod_base = OTHER; note = 2'-deoxy-2'-fluoroadenosine-3'-phosphate
  modified_base 12: mod_base = OTHER; note = 2'-O-methylguanosine-3'-phosphate
  modified_base 13: mod_base = OTHER; note = 2'-O-methyladenosine-3'-phosphate
  modified_base 14: mod_base = OTHER; note = 2'-O-methylguanosine-3'-phosphate
  modified_base 15: mod_base = OTHER; note = 2'-O-methyladenosine-3'-phosphate
  modified_base 16: mod_base = OTHER; note = 2'-O-methyluridine-3'-phosphate
  modified_base 17: mod_base = OTHER; note = 2'-O-methyluridine-3'-phosphate
  modified_base 18: mod_base = OTHER; note = 2'-O-methylcytidine-3'-phosphate
  modified_base 19: mod_base = OTHER; note = 2'-O-methyladenosine-3'-phosphate
  modified_base 20: mod_base = OTHER; note = 2'-O-methyladenosine-3'-phosphate
  modified_base 21: mod_base = OTHER; note = 2'-O-methyluridine-3'-phosphate ((2S,4R)-1-[29-[[2-(acetylamino)-2-deoxy-beta-D-galactopyra nosyl]oxy]-14,14-bis[[3-[[3-[[5-[[2-(acetylamino)-2-deoxy-b eta-D-galactopyranosyl]oxy]-1-oxopentyl]amino]propyl]amino] -3-oxopropoxy]methyl]-1,12,19,25-tetraoxo-16-oxa-13,20,24-t riazanonacos-1-yl]-4-hydroxy-2-pyrrolidinyl)methyl ester
taccaagccaagagattcaat

SEQ ID NO: 259 - RNA, 21 nt, synthetic construct
  source 1..21: mol_type = other RNA
  modified_base 1: mod_base = OTHER; note = 2'-O-methyladenosine-3'-phosphorothioate
  modified_base 2: mod_base = OTHER; note = 2'-O-methylguanosine-3'-phosphorothioate
  modified_base 3: mod_base = OTHER; note = 2'-O-methyladenosine-3'-phosphate
  modified_base 4: mod_base = OTHER; note = 2'-O-methylguanosine-3'-phosphate
  modified_base 5: mod_base = OTHER; note = 2'-O-methyladenosine-3'-phosphate
  modified_base 6: mod_base = OTHER; note = 2'-O-methyluridine-3'-phosphate
  modified_base 7: mod_base = OTHER; note = 2'-deoxy-2'-fluorouridine-3'-phosphate
  modified_base 8: mod_base = OTHER; note = 2'-O-methylcytidine-3'-phosphate
  modified_base 9: mod_base = OTHER; note = 2'-deoxy-2'-fluoroadenosine-3'-phosphate
  modified_base 10: mod_base = OTHER; note = 2'-deoxy-2'-fluoroadenosine-3'-phosphate
  modified_base 11: mod_base = OTHER; note = 2'-deoxy-2'-fluoroguanosine-3'-phosphate
  modified_base 12: mod_base = OTHER; note = 2'-O-methylguanosine-3'-phosphate
  modified_base 13: mod_base = OTHER; note = 2'-O-methyluridine-3'-phosphate
  modified_base 14: mod_base = OTHER; note = 2'-O-methylguanosine-3'-phosphate
  modified_base 15: mod_base = OTHER; note = 2'-O-methyladenosine-3'-phosphate
  modified_base 16: mod_base = OTHER; note = 2'-O-methylguanosine-3'-phosphate
  modified_base 17: mod_base = OTHER; note = 2'-O-methylguanosine-3'-phosphate
  modified_base 18: mod_base = OTHER; note = 2'-O-methylguanosine-3'-phosphate
  modified_base 19: mod_base = OTHER; note = 2'-O-methyluridine-3'-phosphate
  modified_base 20: mod_base = OTHER; note = 2'-O-methyladenosine-3'-phosphate
  modified_base 21: mod_base = OTHER; note = 2'-O-methyluridine-3'-phosphate ((2S,4R)-1-[29-[[2-(acetylamino)-2-deoxy-beta-D-galactopyra nosyl]oxy]-14,14-bis[[3-[[3-[[5-[[2-(acetylamino)-2-deoxy-b eta-D-galactopyranosyl]oxy]-1-oxopentyl]amino]propyl]amino] -3-oxopropoxy]methyl]-1,12,19,25-tetraoxo-16-oxa-13,20,24-t riazanonacos-1-yl]-4-hydroxy-2-pyrrolidinyl)methyl ester
agagattcaaggtgagggtat

SEQ ID NO: 260 - RNA, 21 nt, synthetic construct
  source 1..21: mol_type = other RNA
  modified_base 1: mod_base = OTHER; note = 2'-O-methylguanosine-3'-phosphorothioate
  modified_base 2: mod_base = OTHER; note = 2'-O-methyladenosine-3'-phosphorothioate
  modified_base 3: mod_base = OTHER; note = 2'-O-methylguanosine-3'-phosphate
  modified_base 4: mod_base = OTHER; note = 2'-O-methylguanosine-3'-phosphate
  modified_base 5: mod_base = OTHER; note = 2'-O-methyluridine-3'-phosphate
  modified_base 6: mod_base = OTHER; note = 2'-O-methylguanosine-3'-phosphate
  modified_base 7: mod_base = OTHER; note = 2'-deoxy-2'-fluoroguanosine-3'-phosphate
  modified_base 8: mod_base = OTHER; note = 2'-O-methyladenosine-3'-phosphate
  modified_base 9: mod_base = OTHER; note = 2'-deoxy-2'-fluoroguanosine-3'-phosphate
  modified_base 10: mod_base = OTHER; note = 2'-deoxy-2'-fluoroguanosine-3'-phosphate
  modified_base 11: mod_base = OTHER; note = 2'-deoxy-2'-fluorouridine-3'-phosphate
  modified_base 12: mod_base = OTHER; note = 2'-O-methylguanosine-3'-phosphate
  modified_base 13: mod_base = OTHER; note = 2'-O-methylguanosine-3'-phosphate
  modified_base 14: mod_base = OTHER; note = 2'-O-methyluridine-3'-phosphate
  modified_base 15: mod_base = OTHER; note = 2'-O-methylcytidine-3'-phosphate
  modified_base 16: mod_base = OTHER; note = 2'-O-methyladenosine-3'-phosphate
  modified_base 17: mod_base = OTHER; note = 2'-O-methyluridine-3'-phosphate
  modified_base 18: mod_base = OTHER; note = 2'-O-methylcytidine-3'-phosphate
  modified_base 19: mod_base = OTHER; note = 2'-O-methyladenosine-3'-phosphate
  modified_base 20: mod_base = OTHER; note = 2'-O-methyladenosine-3'-phosphate
  modified_base 21: mod_base = OTHER; note = 2'-O-methyluridine-3'-phosphate ((2S,4R)-1-[29-[[2-(acetylamino)-2-deoxy-beta-D-galactopyra nosyl]oxy]-14,14-bis[[3-[[3-[[5-[[2-(acetylamino)-2-deoxy-b eta-D-galactopyranosyl]oxy]-1-oxopentyl]amino]propyl]amino] -3-oxopropoxy]methyl]-1,12,19,25-tetraoxo-16-oxa-13,20,24-t riazanonacos-1-yl]-4-hydroxy-2-pyrrolidinyl)methyl ester
gaggtggaggtggtcatcaat

SEQ ID NO: 261 - RNA, 21 nt, synthetic construct
  source 1..21: mol_type = other RNA
  modified_base 1: mod_base = OTHER; note = 2'-O-methylguanosine-3'-phosphorothioate
  modified_base 2: mod_base = OTHER; note = 2'-O-methyluridine-3'-phosphorothioate
  modified_base 3: mod_base = OTHER; note = 2'-O-methylguanosine-3'-phosphate
  modified_base 4: mod_base = OTHER; note = 2'-O-methylguanosine-3'-phosphate
  modified_base 5: mod_base = OTHER; note = 2'-O-methyluridine-3'-phosphate
  modified_base 6: mod_base = OTHER; note = 2'-O-methylcytidine-3'-phosphate
  modified_base 7: mod_base = OTHER; note = 2'-deoxy-2'-fluoroadenosine-3'-phosphate
  modified_base 8: mod_base = OTHER; note = 2'-O-methyluridine-3'-phosphate
  modified_base 9: mod_base = OTHER; note = 2'-deoxy-2'-fluorocytidine-3'-phosphate
  modified_base 10: mod_base = OTHER; note = 2'-deoxy-2'-fluoroadenosine-3'-phosphate
  modified_base 11: mod_base = OTHER; note = 2'-deoxy-2'-fluoroadenosine-3'-phosphate
  modified_base 12: mod_base = OTHER; note = 2'-O-methylguanosine-3'-phosphate
  modified_base 13: mod_base = OTHER; note = 2'-O-methylcytidine-3'-phosphate
  modified_base 14: mod_base = OTHER; note = 2'-O-methyladenosine-3'-phosphate
  modified_base 15: mod_base = OTHER; note = 2'-O-methylcytidine-3'-phosphate
  modified_base 16: mod_base = OTHER; note = 2'-O-methyladenosine-3'-phosphate
  modified_base 17: mod_base = OTHER; note = 2'-O-methyladenosine-3'-phosphate
  modified_base 18: mod_base = OTHER; note = 2'-O-methylcytidine-3'-phosphate
  modified_base 19: mod_base = OTHER; note = 2'-O-methylcytidine-3'-phosphate
  modified_base 20: mod_base = OTHER; note = 2'-O-methylguanosine-3'-phosphate
  modified_base 21: mod_base = OTHER; note = 2'-O-methyluridine-3'-phosphate ((2S,4R)-1-[29-[[2-(acetylamino)-2-deoxy-beta-D-galactopyra nosyl]oxy]-14,14-bis[[3-[[3-[[5-[[2-(acetylamino)-2-deoxy-b eta-D-galactopyranosyl]oxy]-1-oxopentyl]amino]propyl]amino] -3-oxopropoxy]methyl]-1,12,19,25-tetraoxo-16-oxa-13,20,24-t riazanonacos-1-yl]-4-hydroxy-2-pyrrolidinyl)methyl ester
gtggtcatcaagcacaaccgt

SEQ ID NO: 262 - RNA, 21 nt, synthetic construct
  source 1..21: mol_type = other RNA
  modified_base 1: mod_base = OTHER; note = 2'-O-methyladenosine-3'-phosphorothioate
  modified_base 2: mod_base = OTHER; note = 2'-O-methyladenosine-3'-phosphorothioate
  modified_base 3: mod_base = OTHER; note = 2'-O-methylguanosine-3'-phosphate
  modified_base 4: mod_base = OTHER; note = 2'-O-methylcytidine-3'-phosphate
  modified_base 5: mod_base = OTHER; note = 2'-O-methyladenosine-3'-phosphate
  modified_base 6: mod_base = OTHER; note = 2'-O-methylcytidine-3'-phosphate
  modified_base 7: mod_base = OTHER; note = 2'-deoxy-2'-fluoroadenosine-3'-phosphate
  modified_base 8: mod_base = OTHER; note = 2'-O-methyladenosine-3'-phosphate
  modified_base 9: mod_base = OTHER; note = 2'-deoxy-2'-fluorocytidine-3'-phosphate
  modified_base 10: mod_base = OTHER; note = 2'-deoxy-2'-fluorocytidine-3'-phosphate
  modified_base 11: mod_base = OTHER; note = 2'-deoxy-2'-fluoroguanosine-3'-phosphate
  modified_base 12: mod_base = OTHER; note = 2'-O-methylguanosine-3'-phosphate
  modified_base 13: mod_base = OTHER; note = 2'-O-methyluridine-3'-phosphate
  modified_base 14: mod_base = OTHER; note = 2'-O-methyluridine-3'-phosphate
  modified_base 15: mod_base = OTHER; note = 2'-O-methylcytidine-3'-phosphate
  modified_base 16: mod_base = OTHER; note = 2'-O-methyladenosine-3'-phosphate
  modified_base 17: mod_base = OTHER; note = 2'-O-methylcytidine-3'-phosphate
  modified_base 18: mod_base = OTHER; note = 2'-O-methyladenosine-3'-phosphate
  modified_base 19: mod_base = OTHER; note = 2'-O-methyladenosine-3'-phosphate
  modified_base 20: mod_base = OTHER; note = 2'-O-methyladenosine-3'-phosphate
  modified_base 21: mod_base = OTHER; note = 2'-O-methyluridine-3'-phosphate ((2S,4R)-1-[29-[[2-(acetylamino)-2-deoxy-beta-D-galactopyra nosyl]oxy]-14,14-bis[[3-[[3-[[5-[[2-(acetylamino)-2-deoxy-b eta-D-galactopyranosyl]oxy]-1-oxopentyl]amino]propyl]amino] -3-oxopropoxy]methyl]-1,12,19,25-tetraoxo-16-oxa-13,20,24-t riazanonacos-1-yl]-4-hydroxy-2-pyrrolidinyl)methyl ester
aagcacaaccggttcacaaat

SEQ ID NO: 263 - RNA, 21 nt, synthetic construct
  source 1..21: mol_type = other RNA
  modified_base 1: mod_base = OTHER; note = 2'-O-methyladenosine-3'-phosphorothioate
  modified_base 2: mod_base = OTHER; note = 2'-O-methylcytidine-3'-phosphorothioate
  modified_base 3: mod_base = OTHER; note = 2'-O-methyladenosine-3'-phosphate
  modified_base 4: mod_base = OTHER; note = 2'-O-methyladenosine-3'-phosphate
  modified_base 5: mod_base = OTHER; note = 2'-O-methyladenosine-3'-phosphate
  modified_base 6: mod_base = OTHER; note = 2'-O-methylguanosine-3'-phosphate
  modified_base 7: mod_base = OTHER; note = 2'-deoxy-2'-fluoroguanosine-3'-phosphate
  modified_base 8: mod_base = OTHER; note = 2'-O-methyladenosine-3'-phosphate
  modified_base 9: mod_base = OTHER; note = 2'-deoxy-2'-fluoroguanosine-3'-phosphate
  modified_base 10: mod_base = OTHER; note = 2'-deoxy-2'-fluoroadenosine-3'-phosphate
  modified_base 11: mod_base = OTHER; note = 2'-deoxy-2'-fluorocytidine-3'-phosphate
  modified_base 12: mod_base = OTHER; note = 2'-O-methylcytidine-3'-phosphate
  modified_base 13: mod_base = OTHER; note = 2'-O-methyluridine-3'-phosphate
  modified_base 14: mod_base = OTHER; note = 2'-O-methyladenosine-3'-phosphate
  modified_base 15: mod_base = OTHER; note = 2'-O-methyluridine-3'-phosphate
  modified_base 16: mod_base = OTHER; note = 2'-O-methylguanosine-3'-phosphate
  modified_base 17: mod_base = OTHER; note = 2'-O-methyladenosine-3'-phosphate
  modified_base 18: mod_base = OTHER; note = 2'-O-methylcytidine-3'-phosphate
  modified_base 19: mod_base = OTHER; note = 2'-O-methyluridine-3'-phosphate
  modified_base 20: mod_base = OTHER; note = 2'-O-methyluridine-3'-phosphate
  modified_base 21: mod_base = OTHER; note = 2'-O-methyluridine-3'-phosphate ((2S,4R)-1-[29-[[2-(acetylamino)-2-deoxy-beta-D-galactopyra nosyl]oxy]-14,14-bis[[3-[[3-[[5-[[2-(acetylamino)-2-deoxy-b eta-D-galactopyranosyl]oxy]-1-oxopentyl]amino]propyl]amino] -3-oxopropoxy]methyl]-1,12,19,25-tetraoxo-16-oxa-13,20,24-t riazanonacos-1-yl]-4-hydroxy-2-pyrrolidinyl)methyl ester
acaaaggagacctatgacttt

SEQ ID NO: 264 - RNA, 21 nt, synthetic construct
  source 1..21: mol_type = other RNA
  modified_base 1: mod_base = OTHER; note = 2'-O-methyladenosine-3'-phosphorothioate
  modified_base 2: mod_base = OTHER; note = 2'-O-methylcytidine-3'-phosphorothioate
  modified_base 3: mod_base = OTHER; note = 2'-O-methylcytidine-3'-phosphate
  modified_base 4: mod_base = OTHER; note = 2'-O-methyluridine-3'-phosphate
  modified_base 5: mod_base = OTHER; note = 2'-O-methyladenosine-3'-phosphate
  modified_base 6: mod_base = OTHER; note = 2'-O-methyluridine-3'-phosphate
  modified_base 7: mod_base = OTHER; note = 2'-deoxy-2'-fluoroguanosine-3'-phosphate
  modified_base 8: mod_base = OTHER; note = 2'-O-methyladenosine-3'-phosphate
  modified_base 9: mod_base = OTHER; note = 2'-deoxy-2'-fluorocytidine-3'-phosphate
  modified_base 10: mod_base = OTHER; note = 2'-deoxy-2'-fluorouridine-3'-phosphate
  modified_base 11: mod_base = OTHER; note = 2'-deoxy-2'-fluorouridine-3'-phosphate
  modified_base 12: mod_base = OTHER; note = 2'-O-methylcytidine-3'-phosphate
  modified_base 13: mod_base = OTHER; note = 2'-O-methylguanosine-3'-phosphate
  modified_base 14: mod_base = OTHER; note = 2'-O-methyladenosine-3'-phosphate
  modified_base 15: mod_base = OTHER; note = 2'-O-methylcytidine-3'-phosphate
  modified_base 16: mod_base = OTHER; note = 2'-O-methyladenosine-3'-phosphate
  modified_base 17: mod_base = OTHER; note = 2'-O-methyluridine-3'-phosphate
  modified_base 18: mod_base = OTHER; note = 2'-O-methylcytidine-3'-phosphate
  modified_base 19: mod_base = OTHER; note = 2'-O-methylguanosine-3'-phosphate
  modified_base 20: mod_base = OTHER; note = 2'-O-methylcytidine-3'-phosphate
  modified_base 21: mod_base = OTHER; note = 2'-O-methyluridine-3'-phosphate ((2S,4R)-1-[29-[[2-(acetylamino)-2-deoxy-beta-D-galactopyra nosyl]oxy]-14,14-bis[[3-[[3-[[5-[[2-(acetylamino)-2-deoxy-b eta-D-galactopyranosyl]oxy]-1-oxopentyl]amino]propyl]amino] -3-oxopropoxy]methyl]-1,12,19,25-tetraoxo-16-oxa-13,20,24-t riazanonacos-1-yl]-4-hydroxy-2-pyrrolidinyl)methyl ester
acctatgacttcgacatcgct

SEQ ID NO: 265 - RNA, 21 nt, synthetic construct
  source 1..21: mol_type = other RNA
  modified_base 1: mod_base = OTHER; note = 2'-O-methyluridine-3'-phosphorothioate
  modified_base 2: mod_base = OTHER; note = 2'-O-methyluridine-3'-phosphorothioate
  modified_base 3: mod_base = OTHER; note = 2'-O-methylcytidine-3'-phosphate
  modified_base 4: mod_base = OTHER; note = 2'-O-methylguanosine-3'-phosphate
  modified_base 5: mod_base = OTHER; note = 2'-O-methyladenosine-3'-phosphate
  modified_base 6: mod_base = OTHER; note = 2'-O-methylcytidine-3'-phosphate
  modified_base 7: mod_base = OTHER; note = 2'-deoxy-2'-fluoroadenosine-3'-phosphate
  modified_base 8: mod_base = OTHER; note = 2'-O-methyluridine-3'-phosphate
  modified_base 9: mod_base = OTHER; note = 2'-deoxy-2'-fluorocytidine-3'-phosphate
  modified_base 10: mod_base = OTHER; note = 2'-deoxy-2'-fluoroguanosine-3'-phosphate
  modified_base 11: mod_base = OTHER; note = 2'-deoxy-2'-fluorocytidine-3'-phosphate
  modified_base 12: mod_base = OTHER; note = 2'-O-methylcytidine-3'-phosphate
  modified_base 13: mod_base = OTHER; note = 2'-O-methylguanosine-3'-phosphate
  modified_base 14: mod_base = OTHER; note = 2'-O-methyluridine-3'-phosphate
  modified_base 15: mod_base = OTHER; note = 2'-O-methylguanosine-3'-phosphate
  modified_base 16: mod_base = OTHER; note = 2'-O-methylcytidine-3'-phosphate
  modified_base 17: mod_base = OTHER; note = 2'-O-methyluridine-3'-phosphate
  modified_base 18: mod_base = OTHER; note = 2'-O-methylcytidine-3'-phosphate
  modified_base 19: mod_base = OTHER; note = 2'-O-methylcytidine-3'-phosphate
  modified_base 20: mod_base = OTHER; note = 2'-O-methylguanosine-3'-phosphate
  modified_base 21: mod_base = OTHER; note = 2'-O-methyluridine-3'-phosphate ((2S,4R)-1-[29-[[2-(acetylamino)-2-deoxy-beta-D-galactopyra nosyl]oxy]-14,14-bis[[3-[[3-[[5-[[2-(acetylamino)-2-deoxy-b eta-D-galactopyranosyl]oxy]-1-oxopentyl]amino]propyl]amino] -3-oxopropoxy]methyl]-1,12,19,25-tetraoxo-16-oxa-13,20,24-t riazanonacos-1-yl]-4-hydroxy-2-pyrrolidinyl)methyl ester
ttcgacatcgccgtgctccgt

SEQ ID NO: 266 - RNA, 21 nt, synthetic construct
  source 1..21: mol_type = other RNA
  modified_base 1: mod_base = OTHER; note = 2'-O-methyladenosine-3'-phosphorothioate
  modified_base 2: mod_base = OTHER; note = 2'-O-methyluridine-3'-phosphorothioate
  modified_base 3: mod_base = OTHER; note = 2'-O-methylcytidine-3'-phosphate
  modified_base 4: mod_base = OTHER; note = 2'-O-methyladenosine-3'-phosphate
  modified_base 5: mod_base = OTHER; note = 2'-O-methylcytidine-3'-phosphate
  modified_base 6: mod_base = OTHER; note = 2'-O-methylcytidine-3'-phosphate
  modified_base 7: mod_base = OTHER; note = 2'-deoxy-2'-fluorouridine-3'-phosphate
  modified_base 8: mod_base = OTHER; note = 2'-O-methyluridine-3'-phosphate
  modified_base 9: mod_base = OTHER; note = 2'-deoxy-2'-fluorocytidine-3'-phosphate
  modified_base 10: mod_base = OTHER; note = 2'-deoxy-2'-fluorocytidine-3'-phosphate
  modified_base 11: mod_base = OTHER; note = 2'-deoxy-2'-fluoroguanosine-3'-phosphate
  modified_base 12: mod_base = OTHER; note = 2'-O-methylcytidine-3'-phosphate
  modified_base 13: mod_base = OTHER; note = 2'-O-methyladenosine-3'-phosphate
  modified_base 14: mod_base = OTHER; note = 2'-O-methyluridine-3'-phosphate
  modified_base 15: mod_base = OTHER; note = 2'-O-methylguanosine-3'-phosphate
  modified_base 16: mod_base = OTHER; note = 2'-O-methyladenosine-3'-phosphate
  modified_base 17: mod_base = OTHER; note = 2'-O-methyladenosine-3'-phosphate
  modified_base 18: mod_base = OTHER; note = 2'-O-methylcytidine-3'-phosphate
  modified_base 19: mod_base = OTHER; note = 2'-O-methylguanosine-3'-phosphate
  modified_base 20: mod_base = OTHER; note = 2'-O-methyluridine-3'-phosphate
  modified_base 21: mod_base = OTHER; note = 2'-O-methyluridine-3'-phosphate ((2S,4R)-1-[29-[[2-(acetylamino)-2-deoxy-beta-D-galactopyra nosyl]oxy]-14,14-bis[[3-[[3-[[5-[[2-(acetylamino)-2-deoxy-b eta-D-galactopyranosyl]oxy]-1-oxopentyl]amino]propyl]amino] -3-oxopropoxy]methyl]-1,12,19,25-tetraoxo-16-oxa-13,20,24-t riazanonacos-1-yl]-4-hydroxy-2-pyrrolidinyl)methyl ester
atcaccttccgcatgaacgtt

SEQ ID NO: 267 - RNA, 21 nt, synthetic construct
  source 1..21: mol_type = other RNA
  modified_base 1: mod_base = OTHER; note = 2'-O-methyluridine-3'-phosphorothioate
  modified_base 2: mod_base = OTHER; note = 2'-O-methylguanosine-3'-phosphorothioate
  modified_base 3: mod_base = OTHER; note = 2'-O-methylguanosine-3'-phosphate
  modified_base 4: mod_base = OTHER; note = 2'-O-methylguanosine-3'-phosphate
  modified_base 5: mod_base = OTHER; note = 2'-O-methylcytidine-3'-phosphate
  modified_base 6: mod_base = OTHER; note = 2'-O-methylcytidine-3'-phosphate
  modified_base 7: mod_base = OTHER; note = 2'-deoxy-2'-fluoroguanosine-3'-phosphate
  modified_base 8: mod_base = OTHER; note = 2'-O-methyladenosine-3'-phosphate
  modified_base 9: mod_base = OTHER; note = 2'-deoxy-2'-fluoroguanosine-3'-phosphate
  modified_base 10: mod_base = OTHER; note = 2'-deoxy-2'-fluorouridine-3'-phosphate
  modified_base 11: mod_base = OTHER; note = 2'-deoxy-2'-fluorocytidine-3'-phosphate
  modified_base 12: mod_base = OTHER; note = 2'-O-methylcytidine-3'-phosphate
  modified_base 13: mod_base = OTHER; note = 2'-O-methyladenosine-3'-phosphate
  modified_base 14: mod_base = OTHER; note = 2'-O-methylcytidine-3'-phosphate
  modified_base 15: mod_base = OTHER; note = 2'-O-methylguanosine-3'-phosphate
  modified_base 16: mod_base = OTHER; note = 2'-O-methylcytidine-3'-phosphate
  modified_base 17: mod_base = OTHER; note = 2'-O-methyluridine-3'-phosphate
  modified_base 18: mod_base = OTHER; note = 2'-O-methylguanosine-3'-phosphate
  modified_base 19: mod_base = OTHER; note = 2'-O-methyladenosine-3'-phosphate
  modified_base 20: mod_base = OTHER; note = 2'-O-methyluridine-3'-phosphate
  modified_base 21: mod_base = OTHER; note = 2'-O-methyluridine-3'-phosphate ((2S,4R)-1-[29-[[2-(acetylamino)-2-deoxy-beta-D-galactopyra nosyl]oxy]-14,14-bis[[3-[[3-[[5-[[2-(acetylamino)-2-deoxy-b eta-D-galactopyranosyl]oxy]-1-oxopentyl]amino]propyl]amino] -3-oxopropoxy]methyl]-1,12,19,25-tetraoxo-16-oxa-13,20,24-t riazanonacos-1-yl]-4-hydroxy-2-pyrrolidinyl)methyl ester
tgggccgagtccacgctgatt

SEQ ID NO: 268 - RNA, 21 nt, synthetic construct
  source 1..21: mol_type = other RNA
  modified_base 1: mod_base = OTHER; note = 2'-O-methyladenosine-3'-phosphorothioate
  modified_base 2: mod_base = OTHER; note = 2'-O-methylcytidine-3'-phosphorothioate
  modified_base 3: mod_base = OTHER; note = 2'-O-methylguanosine-3'-phosphate
  modified_base 4: mod_base = OTHER; note = 2'-O-methylcytidine-3'-phosphate
  modified_base 5: mod_base = OTHER; note = 2'-O-methyluridine-3'-phosphate
  modified_base 6: mod_base = OTHER; note = 2'-O-methylguanosine-3'-phosphate
  modified_base 7: mod_base = OTHER; note = 2'-deoxy-2'-fluoroadenosine-3'-phosphate
  modified_base 8: mod_base = OTHER; note = 2'-O-methyluridine-3'-phosphate
  modified_base 9: mod_base = OTHER; note = 2'-deoxy-2'-fluoroguanosine-3'-phosphate
  modified_base 10: mod_base = OTHER; note = 2'-deoxy-2'-fluoroadenosine-3'-phosphate
  modified_base 11: mod_base = OTHER; note = 2'-deoxy-2'-fluorocytidine-3'-phosphate
  modified_base 12: mod_base = OTHER; note = 2'-O-methylguanosine-3'-phosphate
  modified_base 13: mod_base = OTHER; note = 2'-O-methylcytidine-3'-phosphate
  modified_base 14: mod_base = OTHER; note = 2'-O-methyladenosine-3'-phosphate
  modified_base 15: mod_base = OTHER; note = 2'-O-methylguanosine-3'-phosphate
  modified_base 16: mod_base = OTHER; note = 2'-O-methyladenosine-3'-phosphate
  modified_base 17: mod_base = OTHER; note = 2'-O-methyladenosine-3'-phosphate
  modified_base 18: mod_base = OTHER; note = 2'-O-methylguanosine-3'-phosphate
  modified_base 19: mod_base = OTHER; note = 2'-O-methyladenosine-3'-phosphate
  modified_base 20: mod_base = OTHER; note = 2'-O-methylcytidine-3'-phosphate
  modified_base 21: mod_base = OTHER; note = 2'-O-methyluridine-3'-phosphate ((2S,4R)-1-[29-[[2-(acetylamino)-2-deoxy-beta-D-galactopyra nosyl]oxy]-14,14-bis[[3-[[3-[[5-[[2-(acetylamino)-2-deoxy-b eta-D-galactopyranosyl]oxy]-1-oxopentyl]amino]propyl]amino] -3-oxopropoxy]methyl]-1,12,19,25-tetraoxo-16-oxa-13,20,24-t riazanonacos-1-yl]-4-hydroxy-2-pyrrolidinyl)methyl ester
acgctgatgacgcagaagact

SEQ ID NO: 269 - RNA, 21 nt, synthetic construct
  source 1..21: mol_type = other RNA
  modified_base 1: mod_base = OTHER; note = 2'-O-methylcytidine-3'-phosphorothioate
  modified_base 2: mod_base = OTHER; note = 2'-O-methyladenosine-3'-phosphorothioate
  modified_base 3: mod_base = OTHER; note = 2'-O-methylguanosine-3'-phosphate
  modified_base 4: mod_base = OTHER; note = 2'-O-methyluridine-3'-phosphate
  modified_base 5: mod_base = OTHER; note = 2'-O-methylcytidine-3'-phosphate
  modified_base 6: mod_base = OTHER; note = 2'-O-methylcytidine-3'-phosphate
  modified_base 7: mod_base = OTHER; note = 2'-deoxy-2'-fluoroadenosine-3'-phosphate
  modified_base 8: mod_base = OTHER; note = 2'-O-methylcytidine-3'-phosphate
  modified_base 9: mod_base = OTHER; note = 2'-deoxy-2'-fluorocytidine-3'-phosphate
  modified_base 10: mod_base = OTHER; note = 2'-deoxy-2'-fluoroadenosine-3'-phosphate
  modified_base 11: mod_base = OTHER; note = 2'-deoxy-2'-fluoroguanosine-3'-phosphate
  modified_base 12: mod_base = OTHER; note = 2'-O-methylguanosine-3'-phosphate
  modified_base 13: mod_base = OTHER; note = 2'-O-methylcytidine-3'-phosphate
  modified_base 14: mod_base = OTHER; note = 2'-O-methyluridine-3'-phosphate
  modified_base 15: mod_base = OTHER; note = 2'-O-methylcytidine-3'-phosphate
  modified_base 16: mod_base = OTHER; note = 2'-O-methyladenosine-3'-phosphate
  modified_base 17: mod_base = OTHER; note = 2'-O-methyladenosine-3'-phosphate
  modified_base 18: mod_base = OTHER; note = 2'-O-methylguanosine-3'-phosphate
  modified_base 19: mod_base = OTHER; note = 2'-O-methyladenosine-3'-phosphate
  modified_base 20: mod_base = OTHER; note = 2'-O-methyluridine-3'-phosphate
  modified_base 21: mod_base = OTHER; note = 2'-O-methyluridine-3'-phosphate ((2S,4R)-1-[29-[[2-(acetylamino)-2-deoxy-beta-D-galactopyra nosyl]oxy]-14,14-bis[[3-[[3-[[5-[[2-(acetylamino)-2-deoxy-b eta-D-galactopyranosyl]oxy]-1-oxopentyl]amino]propyl]amino] -3-oxopropoxy]methyl]-1,12,19,25-tetraoxo-16-oxa-13,20,24-t riazanonacos-1-yl]-4-hydroxy-2-pyrrolidinyl)methyl ester
cagtccaccaggctcaagatt

SEQ ID NO: 270 - RNA, 21 nt, synthetic construct
  source 1..21: mol_type = other RNA
  modified_base 1: mod_base = OTHER; note = 2'-O-methyladenosine-3'-phosphorothioate
  modified_base 2: mod_base = OTHER; note = 2'-O-methylguanosine-3'-phosphorothioate
  modified_base 3: mod_base = OTHER; note = 2'-O-methylguanosine-3'-phosphate
  modified_base 4: mod_base = OTHER; note = 2'-O-methylcytidine-3'-phosphate
  modified_base 5: mod_base = OTHER; note = 2'-O-methyluridine-3'-phosphate
  modified_base 6: mod_base = OTHER; note = 2'-O-methylcytidine-3'-phosphate
  modified_base 7: mod_base = OTHER; note = 2'-deoxy-2'-fluoroadenosine-3'-phosphate
  modified_base 8: mod_base = OTHER; note = 2'-O-methyladenosine-3'-phosphate
  modified_base 9: mod_base = OTHER; note = 2'-deoxy-2'-fluoroguanosine-3'-phosphate
  modified_base 10: mod_base = OTHER; note = 2'-deoxy-2'-fluoroadenosine-3'-phosphate
  modified_base 11: mod_base = OTHER; note = 2'-deoxy-2'-fluorouridine-3'-phosphate
  modified_base 12: mod_base = OTHER; note = 2'-O-methylguanosine-3'-phosphate
  modified_base 13: mod_base = OTHER; note = 2'-O-methylcytidine-3'-phosphate
  modified_base 14: mod_base = OTHER; note = 2'-O-methyluridine-3'-phosphate
  modified_base 15: mod_base = OTHER; note = 2'-O-methylguanosine-3'-phosphate
  modified_base 16: mod_base = OTHER; note = 2'-O-methylguanosine-3'-phosphate
  modified_base 17: mod_base = OTHER; note = 2'-O-methyladenosine-3'-phosphate
  modified_base 18: mod_base = OTHER; note = 2'-O-methylguanosine-3'-phosphate
  modified_base 19: mod_base = OTHER; note = 2'-O-methylguanosine-3'-phosphate
  modified_base 20: mod_base = OTHER; note = 2'-O-methyluridine-3'-phosphate
  modified_base 21: mod_base = OTHER; note = 2'-O-methyluridine-3'-phosphate ((2S,4R)-1-[29-[[2-(acetylamino)-2-deoxy-beta-D-galactopyra nosyl]oxy]-14,14-bis[[3-[[3-[[5-[[2-(acetylamino)-2-deoxy-b eta-D-galactopyranosyl]oxy]-1-oxopentyl]amino]propyl]amino] -3-oxopropoxy]methyl]-1,12,19,25-tetraoxo-16-oxa-13,20,24-t riazanonacos-1-yl]-4-hydroxy-2-pyrrolidinyl)methyl ester
aggctcaagatgctggaggtt

SEQ ID NO: 271 - RNA, 21 nt, synthetic construct
  source 1..21: mol_type = other RNA
  modified_base 1: mod_base = OTHER; note = 2'-O-methylcytidine-3'-phosphorothioate
  modified_base 2: mod_base = OTHER; note = 2'-O-methyluridine-3'-phosphorothioate
  modified_base 3: mod_base = OTHER; note = 2'-O-methylguanosine-3'-phosphate
  modified_base 4: mod_base = OTHER; note = 2'-O-methylguanosine-3'-phosphate
  modified_base 5: mod_base = OTHER; note = 2'-O-methyladenosine-3'-phosphate
  modified_base 6: mod_base = OTHER; note = 2'-O-methylguanosine-3'-phosphate
  modified_base 7: mod_base = OTHER; note = 2'-deoxy-2'-fluoroguanosine-3'-phosphate
  modified_base 8: mod_base = OTHER; note = 2'-O-methyluridine-3'-phosphate
  modified_base 9: mod_base = OTHER; note = 2'-deoxy-2'-fluoroguanosine-3'-phosphate
  modified_base 10: mod_base = OTHER; note = 2'-deoxy-2'-fluorocytidine-3'-phosphate
  modified_base 11: mod_base = OTHER; note = 2'-deoxy-2'-fluorocytidine-3'-phosphate
  modified_base 12: mod_base = OTHER; note = 2'-O-methylcytidine-3'-phosphate
  modified_base 13: mod_base = OTHER; note = 2'-O-methyluridine-3'-phosphate
  modified_base 14: mod_base = OTHER; note = 2'-O-methyladenosine-3'-phosphate
  modified_base 15: mod_base = OTHER; note = 2'-O-methylcytidine-3'-phosphate
  modified_base 16: mod_base = OTHER; note = 2'-O-methylguanosine-3'-phosphate
  modified_base 17: mod_base = OTHER; note = 2'-O-methyluridine-3'-phosphate
  modified_base 18: mod_base = OTHER; note = 2'-O-methylguanosine-3'-phosphate
  modified_base 19: mod_base = OTHER; note = 2'-O-methylguanosine-3'-phosphate
  modified_base 20: mod_base = OTHER; note = 2'-O-methyladenosine-3'-phosphate
  modified_base 21: mod_base = OTHER; note = 2'-O-methyluridine-3'-phosphate ((2S,4R)-1-[29-[[2-(acetylamino)-2-deoxy-beta-D-galactopyra nosyl]oxy]-14,14-bis[[3-[[3-[[5-[[2-(acetylamino)-2-deoxy-b eta-D-galactopyranosyl]oxy]-1-oxopentyl]amino]propyl]amino] -3-oxopropoxy]methyl]-1,12,19,25-tetraoxo-16-oxa-13,20,24-t riazanonacos-1-yl]-4-hydroxy-2-pyrrolidinyl)methyl ester
ctggaggtgccctacgtggat

SEQ ID NO: 272 - RNA, 21 nt, synthetic construct
  source 1..21: mol_type = other RNA
  modified_base 1: mod_base = OTHER; note = 2'-O-methylcytidine-3'-phosphorothioate
  modified_base 2: mod_base = OTHER; note = 2'-O-methyluridine-3'-phosphorothioate
  modified_base 3: mod_base = OTHER; note = 2'-O-methyladenosine-3'-phosphate
  modified_base 4: mod_base = OTHER; note = 2'-O-methylcytidine-3'-phosphate
  modified_base 5: mod_base = OTHER; note = 2'-O-methylguanosine-3'-phosphate
  modified_base 6: mod_base = OTHER; note = 2'-O-methyluridine-3'-phosphate
  modified_base 7: mod_base = OTHER; note = 2'-deoxy-2'-fluoroguanosine-3'-phosphate
  modified_base 8: mod_base = OTHER; note = 2'-O-methylguanosine-3'-phosphate
  modified_base 9: mod_base = OTHER; note = 2'-deoxy-2'-fluoroadenosine-3'-phosphate
  modified_base 10: mod_base = OTHER; note = 2'-deoxy-2'-fluorocytidine-3'-phosphate
  modified_base 11: mod_base = OTHER; note = 2'-deoxy-2'-fluorocytidine-3'-phosphate
  modified_base 12: mod_base = OTHER; note = 2'-O-methylguanosine-3'-phosphate
  modified_base 13: mod_base = OTHER; note = 2'-O-methylcytidine-3'-phosphate
  modified_base 14: mod_base = OTHER; note = 2'-O-methyladenosine-3'-phosphate
  modified_base 15: mod_base = OTHER; note = 2'-O-methyladenosine-3'-phosphate
  modified_base 16: mod_base = OTHER; note = 2'-O-methylcytidine-3'-phosphate
  modified_base 17: mod_base = OTHER; note = 2'-O-methyladenosine-3'-phosphate
  modified_base 18: mod_base = OTHER; note = 2'-O-methylguanosine-3'-phosphate
  modified_base 19: mod_base = OTHER; note = 2'-O-methylcytidine-3'-phosphate
  modified_base 20: mod_base = OTHER; note = 2'-O-methyluridine-3'-phosphate
  modified_base 21: mod_base = OTHER; note = 2'-O-methyluridine-3'-phosphate ((2S,4R)-1-[29-[[2-(acetylamino)-2-deoxy-beta-D-galactopyra nosyl]oxy]-14,14-bis[[3-[[3-[[5-[[2-(acetylamino)-2-deoxy-b eta-D-galactopyranosyl]oxy]-1-oxopentyl]amino]propyl]amino] -3-oxopropoxy]methyl]-1,12,19,25-tetraoxo-16-oxa-13,20,24-t riazanonacos-1-yl]-4-hydroxy-2-pyrrolidinyl)methyl ester
ctacgtggaccgcaacagctt

SEQ ID NO: 273 - RNA, 21 nt, synthetic construct
  source 1..21: mol_type = other RNA
  modified_base 1: mod_base = OTHER; note = 2'-O-methylcytidine-3'-phosphorothioate
  modified_base 2: mod_base = OTHER; note = 2'-O-methylcytidine-3'-phosphorothioate
  modified_base 3: mod_base = OTHER; note = 2'-O-methylguanosine-3'-phosphate
  modified_base 4: mod_base = OTHER; note = 2'-O-methylcytidine-3'-phosphate
  modified_base 5: mod_base = OTHER; note = 2'-O-methyladenosine-3'-phosphate
  modified_base 6: mod_base = OTHER; note = 2'-O-methyladenosine-3'-phosphate
  modified_base 7: mod_base = OTHER; note = 2'-deoxy-2'-fluorocytidine-3'-phosphate
  modified_base 8: mod_base = OTHER; note = 2'-O-methyladenosine-3'-phosphate
  modified_base 9: mod_base = OTHER; note = 2'-deoxy-2'-fluoroguanosine-3'-phosphate
  modified_base 10: mod_base = OTHER; note = 2'-deoxy-2'-fluorocytidine-3'-phosphate
  modified_base 11: mod_base = OTHER; note = 2'-deoxy-2'-fluorouridine-3'-phosphate
  modified_base 12: mod_base = OTHER; note = 2'-O-methylguanosine-3'-phosphate
  modified_base 13: mod_base = OTHER; note = 2'-O-methylcytidine-3'-phosphate
  modified_base 14: mod_base = OTHER; note = 2'-O-methyladenosine-3'-phosphate
  modified_base 15: mod_base = OTHER; note = 2'-O-methyladenosine-3'-phosphate
  modified_base 16: mod_base = OTHER; note = 2'-O-methylguanosine-3'-phosphate
  modified_base 17: mod_base = OTHER; note = 2'-O-methylcytidine-3'-phosphate
  modified_base 18: mod_base = OTHER; note = 2'-O-methyluridine-3'-phosphate
  modified_base 19: mod_base = OTHER; note = 2'-O-methylguanosine-3'-phosphate
  modified_base 20: mod_base = OTHER; note = 2'-O-methyluridine-3'-phosphate
  modified_base 21: mod_base = OTHER; note = 2'-O-methyluridine-3'-phosphate ((2S,4R)-1-[29-[[2-(acetylamino)-2-deoxy-beta-D-galactopyra nosyl]oxy]-14,14-bis[[3-[[3-[[5-[[2-(acetylamino)-2-deoxy-b eta-D-galactopyranosyl]oxy]-1-oxopentyl]amino]propyl]amino] -3-oxopropoxy]methyl]-1,12,19,25-tetraoxo-16-oxa-13,20,24-t riazanonacos-1-yl]-4-hydroxy-2-pyrrolidinyl)methyl ester
ccgcaacagctgcaagctgtt

SEQ ID NO: 274 - RNA, 21 nt, synthetic construct
  source 1..21: mol_type = other RNA
  modified_base 1: mod_base = OTHER; note = 2'-O-methylcytidine-3'-phosphorothioate
  modified_base 2: mod_base = OTHER; note = 2'-O-methyluridine-3'-phosphorothioate
  modified_base 3: mod_base = OTHER; note = 2'-O-methylguanosine-3'-phosphate
  modified_base 4: mod_base = OTHER; note = 2'-O-methylcytidine-3'-phosphate
  modified_base 5: mod_base = OTHER; note = 2'-O-methyladenosine-3'-phosphate
  modified_base 6: mod_base = OTHER; note = 2'-O-methyladenosine-3'-phosphate
  modified_base 7: mod_base = OTHER; note = 2'-deoxy-2'-fluoroguanosine-3'-phosphate
  modified_base 8: mod_base = OTHER; note = 2'-O-methylcytidine-3'-phosphate
  modified_base 9: mod_base = OTHER; note = 2'-deoxy-2'-fluorouridine-3'-phosphate
  modified_base 10: mod_base = OTHER; note = 2'-deoxy-2'-fluoroguanosine-3'-phosphate
  modified_base 11: mod_base = OTHER; note = 2'-deoxy-2'-fluorouridine-3'-phosphate
  modified_base 12: mod_base = OTHER; note = 2'-O-methylcytidine-3'-phosphate
  modified_base 13: mod_base = OTHER; note = 2'-O-methylcytidine-3'-phosphate
  modified_base 14: mod_base = OTHER; note = 2'-O-methyladenosine-3'-phosphate
  modified_base 15: mod_base = OTHER; note = 2'-O-methylguanosine-3'-phosphate
  modified_base 16: mod_base = OTHER; note = 2'-O-methylcytidine-3'-phosphate
  modified_base 17: mod_base = OTHER; note = 2'-O-methyladenosine-3'-phosphate
  modified_base 18: mod_base = OTHER; note = 2'-O-methylguanosine-3'-phosphate
  modified_base 19: mod_base = OTHER; note = 2'-O-methylcytidine-3'-phosphate
  modified_base 20: mod_base = OTHER; note = 2'-O-methyluridine-3'-phosphate
  modified_base 21: mod_base = OTHER; note = 2'-O-methyluridine-3'-phosphate ((2S,4R)-1-[29-[[2-(acetylamino)-2-deoxy-beta-D-galactopyra nosyl]oxy]-14,14-bis[[3-[[3-[[5-[[2-(acetylamino)-2-deoxy-b eta-D-galactopyranosyl]oxy]-1-oxopentyl]amino]propyl]amino] -3-oxopropoxy]methyl]-1,12,19,25-tetraoxo-16-oxa-13,20,24-t riazanonacos-1-yl]-4-hydroxy-2-pyrrolidinyl)methyl ester
ctgcaagctgtccagcagctt

SEQ ID NO: 275 - RNA, 21 nt, synthetic construct
  source 1..21: mol_type = other RNA
  modified_base 1: mod_base = OTHER; note = 2'-O-methylguanosine-3'-phosphorothioate
  modified_base 2: mod_base = OTHER; note = 2'-O-methyluridine-3'-phosphorothioate
  modified_base 3: mod_base = OTHER; note = 2'-O-methylcytidine-3'-phosphate
  modified_base 4: mod_base = OTHER; note = 2'-O-methylcytidine-3'-phosphate
  modified_base 5: mod_base = OTHER; note = 2'-O-methyladenosine-3'-phosphate
  modified_base 6: mod_base = OTHER; note = 2'-O-methylguanosine-3'-phosphate
  modified_base 7: mod_base = OTHER; note = 2'-deoxy-2'-fluorocytidine-3'-phosphate
  modified_base 8: mod_base = OTHER; note = 2'-O-methyladenosine-3'-phosphate
  modified_base 9: mod_base = OTHER; note = 2'-deoxy-2'-fluoroguanosine-3'-phosphate
  modified_base 10: mod_base = OTHER; note = 2'-deoxy-2'-fluorocytidine-3'-phosphate
  modified_base 11: mod_base = OTHER; note = 2'-deoxy-2'-fluorouridine-3'-phosphate
  modified_base 12: mod_base = OTHER; note = 2'-O-methyluridine-3'-phosphate
  modified_base 13: mod_base = OTHER; note = 2'-O-methylcytidine-3'-phosphate
  modified_base 14: mod_base = OTHER; note = 2'-O-methyladenosine-3'-phosphate
  modified_base 15: mod_base = OTHER; note = 2'-O-methyluridine-3'-phosphate
  modified_base 16: mod_base = OTHER; note = 2'-O-methylcytidine-3'-phosphate
  modified_base 17: mod_base = OTHER; note = 2'-O-methyladenosine-3'-phosphate
  modified_base 18: mod_base = OTHER; note = 2'-O-methyluridine-3'-phosphate
  modified_base 19: mod_base = OTHER; note = 2'-O-methylcytidine-3'-phosphate
  modified_base 20: mod_base = OTHER; note = 2'-O-methyladenosine-3'-phosphate
  modified_base 21: mod_base = OTHER; note = 2'-O-methyluridine-3'-phosphate ((2S,4R)-1-[29-[[2-(acetylamino)-2-deoxy-beta-D-galactopyra nosyl]oxy]-14,14-bis[[3-[[3-[[5-[[2-(acetylamino)-2-deoxy-b eta-D-galactopyranosyl]oxy]-1-oxopentyl]amino]propyl]amino] -3-oxopropoxy]methyl]-1,12,19,25-tetraoxo-16-oxa-13,20,24-t riazanonacos-1-yl]-4-hydroxy-2-pyrrolidinyl)methyl ester
gtccagcagcttcatcatcat

SEQ ID NO: 276 - RNA, 21 nt, synthetic construct
  source 1..21: mol_type = other RNA
  modified_base 1: mod_base = OTHER; note = 2'-O-methylcytidine-3'-phosphorothioate
  modified_base 2: mod_base = OTHER; note = 2'-O-methyladenosine-3'-phosphorothioate
  modified_base 3: mod_base = OTHER; note = 2'-O-methyluridine-3'-phosphate
  modified_base 4: mod_base = OTHER; note = 2'-O-methylcytidine-3'-phosphate
  modified_base 5: mod_base = OTHER; note = 2'-O-methyladenosine-3'-phosphate
  modified_base 6: mod_base = OTHER; note = 2'-O-methylcytidine-3'-phosphate
  modified_base 7: mod_base = OTHER; note = 2'-deoxy-2'-fluorocytidine-3'-phosphate
  modified_base 8: mod_base = OTHER; note = 2'-O-methylcytidine-3'-phosphate
  modified_base 9: mod_base = OTHER; note = 2'-deoxy-2'-fluoroadenosine-3'-phosphate
  modified_base 10: mod_base = OTHER; note = 2'-deoxy-2'-fluoroguanosine-3'-phosphate
  modified_base 11: mod_base = OTHER; note = 2'-deoxy-2'-fluoroadenosine-3'-phosphate
  modified_base 12: mod_base = OTHER; note = 2'-O-methyladenosine-3'-phosphate
  modified_base 13: mod_base = OTHER; note = 2'-O-methylcytidine-3'-phosphate
  modified_base 14: mod_base = OTHER; note = 2'-O-methyladenosine-3'-phosphate
  modified_base 15: mod_base = OTHER; note = 2'-O-methyluridine-3'-phosphate
  modified_base 16: mod_base = OTHER; note = 2'-O-methylguanosine-3'-phosphate
  modified_base 17: mod_base = OTHER; note = 2'-O-methyluridine-3'-phosphate
  modified_base 18: mod_base = OTHER; note = 2'-O-methyluridine-3'-phosphate
  modified_base 19: mod_base = OTHER; note = 2'-O-methylcytidine-3'-phosphate
  modified_base 20: mod_base = OTHER; note = 2'-O-methyluridine-3'-phosphate
  modified_base 21: mod_base = OTHER; note = 2'-O-methyluridine-3'-phosphate ((2S,4R)-1-[29-[[2-(acetylamino)-2-deoxy-beta-D-galactopyra nosyl]oxy]-14,14-bis[[3-[[3-[[5-[[2-(acetylamino)-2-deoxy-b eta-D-galactopyranosyl]oxy]-1-oxopentyl]amino]propyl]amino] -3-oxopropoxy]methyl]-1,12,19,25-tetraoxo-16-oxa-13,20,24-t riazanonacos-1-yl]-4-hydroxy-2-pyrrolidinyl)methyl ester
catcacccagaacatgttctt

SEQ ID NO: 277 - RNA, 21 nt, synthetic construct
  source 1..21: mol_type = other RNA
  modified_base 1: mod_base = OTHER; note = 2'-O-methylguanosine-3'-phosphorothioate
  modified_base 2: mod_base = OTHER; note = 2'-O-methyladenosine-3'-phosphorothioate
  modified_base 3: mod_base = OTHER; note = 2'-O-methyladenosine-3'-phosphate
  modified_base 4: mod_base = OTHER; note = 2'-O-methylcytidine-3'-phosphate
  modified_base 5: mod_base = OTHER; note = 2'-O-methyladenosine-3'-phosphate
  modified_base 6: mod_base = OTHER; note = 2'-O-methyluridine-3'-phosphate
  modified_base 7: mod_base = OTHER; note = 2'-deoxy-2'-fluoroguanosine-3'-phosphate
  modified_base 8: mod_base = OTHER; note = 2'-O-methyluridine-3'-phosphate
  modified_base 9: mod_base = OTHER; note = 2'-deoxy-2'-fluorouridine-3'-phosphate
  modified_base 10: mod_base = OTHER; note = 2'-deoxy-2'-fluorocytidine-3'-phosphate
  modified_base 11: mod_base = OTHER; note = 2'-deoxy-2'-fluorouridine-3'-phosphate
  modified_base 12: mod_base = OTHER; note = 2'-O-methylguanosine-3'-phosphate
  modified_base 13: mod_base = OTHER; note = 2'-O-methyluridine-3'-phosphate
  modified_base 14: mod_base = OTHER; note = 2'-O-methylguanosine-3'-phosphate
  modified_base 15: mod_base = OTHER; note = 2'-O-methylcytidine-3'-phosphate
  modified_base 16: mod_base = OTHER; note = 2'-O-methylcytidine-3'-phosphate
  modified_base 17: mod_base = OTHER; note = 2'-O-methylguanosine-3'-phosphate
  modified_base 18: mod_base = OTHER; note = 2'-O-methylguanosine-3'-phosphate
  modified_base 19: mod_base = OTHER; note = 2'-O-methylcytidine-3'-phosphate
  modified_base 20: mod_base = OTHER; note = 2'-O-methyluridine-3'-phosphate
  modified_base 21: mod_base = OTHER; note = 2'-O-methyluridine-3'-phosphate ((2S,4R)-1-[29-[[2-(acetylamino)-2-deoxy-beta-D-galactopyra nosyl]oxy]-14,14-bis[[3-[[3-[[5-[[2-(acetylamino)-2-deoxy-b eta-D-galactopyranosyl]oxy]-1-oxopentyl]amino]propyl]amino] -3-oxopropoxy]methyl]-1,12,19,25-tetraoxo-16-oxa-13,20,24-t riazanonacos-1-yl]-4-hydroxy-2-pyrrolidinyl)methyl ester
gaacatgttctgtgccggctt

SEQ ID NO: 278 - RNA, 21 nt, synthetic construct
  source 1..21: mol_type = other RNA
  modified_base 1: mod_base = OTHER; note = 2'-O-methylcytidine-3'-phosphorothioate
  modified_base 2: mod_base = OTHER; note = 2'-O-methylcytidine-3'-phosphorothioate
  modified_base 3: mod_base = OTHER; note = 2'-O-methylguanosine-3'-phosphate
  modified_base 4: mod_base = OTHER; note = 2'-O-methylguanosine-3'-phosphate
  modified_base 5: mod_base = OTHER; note = 2'-O-methylcytidine-3'-phosphate
  modified_base 6: mod_base = OTHER; note = 2'-O-methyluridine-3'-phosphate
  modified_base 7: mod_base = OTHER; note = 2'-deoxy-2'-fluoroadenosine-3'-phosphate
  modified_base 8: mod_base = OTHER; note = 2'-O-methylcytidine-3'-phosphate
  modified_base 9: mod_base = OTHER; note = 2'-deoxy-2'-fluoroguanosine-3'-phosphate
  modified_base 10: mod_base = OTHER; note = 2'-deoxy-2'-fluoroadenosine-3'-phosphate
  modified_base 11: mod_base = OTHER; note = 2'-deoxy-2'-fluorocytidine-3'-phosphate
  modified_base 12: mod_base = OTHER; note = 2'-O-methyladenosine-3'-phosphate
  modified_base 13: mod_base = OTHER; note = 2'-O-methylcytidine-3'-phosphate
  modified_base 14: mod_base = OTHER; note = 2'-O-methylcytidine-3'-phosphate
  modified_base 15: mod_base = OTHER; note = 2'-O-methyladenosine-3'-phosphate
  modified_base 16: mod_base = OTHER; note = 2'-O-methyladenosine-3'-phosphate
  modified_base 17: mod_base = OTHER; note = 2'-O-methylguanosine-3'-phosphate
  modified_base 18: mod_base = OTHER; note = 2'-O-methylcytidine-3'-phosphate
  modified_base 19: mod_base = OTHER; note = 2'-O-methyladenosine-3'-phosphate
  modified_base 20: mod_base = OTHER; note = 2'-O-methylguanosine-3'-phosphate
  modified_base 21: mod_base = OTHER; note = 2'-O-methyluridine-3'-phosphate ((2S,4R)-1-[29-[[2-(acetylamino)-2-deoxy-beta-D-galactopyra nosyl]oxy]-14,14-bis[[3-[[3-[[5-[[2-(acetylamino)-2-deoxy-b eta-D-galactopyranosyl]oxy]-1-oxopentyl]amino]propyl]amino] -3-oxopropoxy]methyl]-1,12,19,25-tetraoxo-16-oxa-13,20,24-t riazanonacos-1-yl]-4-hydroxy-2-pyrrolidinyl)methyl ester
ccggctacgacaccaagcagt

SEQ ID NO: 279 - RNA, 21 nt, synthetic construct
  source 1..21: mol_type = other RNA
  modified_base 1: mod_base = OTHER; note = 2'-O-methylcytidine-3'-phosphorothioate
  modified_base 2: mod_base = OTHER; note = 2'-O-methyladenosine-3'-phosphorothioate
  modified_base 3: mod_base = OTHER; note = 2'-O-methylcytidine-3'-phosphate
  modified_base 4: mod_base = OTHER; note = 2'-O-methylcytidine-3'-phosphate
  modified_base 5: mod_base = OTHER; note = 2'-O-methyladenosine-3'-phosphate
  modified_base 6: mod_base = OTHER; note = 2'-O-methyladenosine-3'-phosphate
  modified_base 7: mod_base = OTHER; note = 2'-deoxy-2'-fluoroguanosine-3'-phosphate
  modified_base 8: mod_base = OTHER; note = 2'-O-methylcytidine-3'-phosphate
  modified_base 9: mod_base = OTHER; note = 2'-deoxy-2'-fluoroadenosine-3'-phosphate
  modified_base 10: mod_base = OTHER; note = 2'-deoxy-2'-fluoroguanosine-3'-phosphate
  modified_base 11: mod_base = OTHER; note = 2'-deoxy-2'-fluoroguanosine-3'-phosphate
  modified_base 12: mod_base = OTHER; note = 2'-O-methyladenosine-3'-phosphate
  modified_base 13: mod_base = OTHER; note = 2'-O-methylguanosine-3'-phosphate
  modified_base 14: mod_base = OTHER; note = 2'-O-methylguanosine-3'-phosphate
  modified_base 15: mod_base = OTHER; note = 2'-O-methyladenosine-3'-phosphate
  modified_base 16: mod_base = OTHER; note = 2'-O-methyluridine-3'-phosphate
  modified_base 17: mod_base = OTHER; note = 2'-O-methylguanosine-3'-phosphate
  modified_base 18: mod_base = OTHER; note = 2'-O-methylcytidine-3'-phosphate
  modified_base 19: mod_base = OTHER; note = 2'-O-methylcytidine-3'-phosphate
  modified_base 20: mod_base = OTHER; note = 2'-O-methyluridine-3'-phosphate
  modified_base 21: mod_base = OTHER; note = 2'-O-methyluridine-3'-phosphate ((2S,4R)-1-[29-[[2-(acetylamino)-2-deoxy-beta-D-galactopyra nosyl]oxy]-14,14-bis[[3-[[3-[[5-[[2-(acetylamino)-2-deoxy-b eta-D-galactopyranosyl]oxy]-1-oxopentyl]amino]propyl]amino] -3-oxopropoxy]methyl]-1,12,19,25-tetraoxo-16-oxa-13,20,24-t riazanonacos-1-yl]-4-hydroxy-2-pyrrolidinyl)methyl ester
caccaagcaggaggatgcctt

SEQ ID NO: 280 - RNA, 21 nt, synthetic construct
  source 1..21: mol_type = other RNA
  modified_base 1: mod_base = OTHER; note = 2'-O-methylcytidine-3'-phosphorothioate
  modified_base 2: mod_base = OTHER; note = 2'-O-methylcytidine-3'-phosphorothioate
  modified_base 3: mod_base = OTHER; note = 2'-O-methylguanosine-3'-phosphate
  modified_base 4: mod_base = OTHER; note = 2'-O-methylcytidine-3'-phosphate
  modified_base 5: mod_base = OTHER; note = 2'-O-methyluridine-3'-phosphate
  modified_base 6: mod_base = OTHER; note = 2'-O-methyluridine-3'-phosphate
  modified_base 7: mod_base = OTHER; note = 2'-deoxy-2'-fluorocytidine-3'-phosphate
  modified_base 8: mod_base = OTHER; note = 2'-O-methyladenosine-3'-phosphate
  modified_base 9: mod_base = OTHER; note = 2'-deoxy-2'-fluoroadenosine-3'-phosphate
  modified_base 10: mod_base = OTHER; note = 2'-deoxy-2'-fluoroguanosine-3'-phosphate
  modified_base 11: mod_base = OTHER; note = 2'-deoxy-2'-fluoroguanosine-3'-phosphate
  modified_base 12: mod_base = OTHER; note = 2'-O-methyladenosine-3'-phosphate
  modified_base 13: mod_base = OTHER; note = 2'-O-methylcytidine-3'-phosphate
  modified_base 14: mod_base = OTHER; note = 2'-O-methyladenosine-3'-phosphate
  modified_base 15: mod_base = OTHER; note = 2'-O-methylcytidine-3'-phosphate
  modified_base 16: mod_base = OTHER; note = 2'-O-methylcytidine-3'-phosphate
  modified_base 17: mod_base = OTHER; note = 2'-O-methyluridine-3'-phosphate
  modified_base 18: mod_base = OTHER; note = 2'-O-methyladenosine-3'-phosphate
  modified_base 19: mod_base = OTHER; note = 2'-O-methylcytidine-3'-phosphate
  modified_base 20: mod_base = OTHER; note = 2'-O-methyluridine-3'-phosphate
  modified_base 21: mod_base = OTHER; note = 2'-O-methyluridine-3'-phosphate ((2S,4R)-1-[29-[[2-(acetylamino)-2-deoxy-beta-D-galactopyra nosyl]oxy]-14,14-bis[[3-[[3-[[5-[[2-(acetylamino)-2-deoxy-b eta-D-galactopyranosyl]oxy]-1-oxopentyl]amino]propyl]amino] -3-oxopropoxy]methyl]-1,12,19,25-tetraoxo-16-oxa-13,20,24-t riazanonacos-1-yl]-4-hydroxy-2-pyrrolidinyl)methyl ester
ccgcttcaaggacacctactt

SEQ ID NO: 281 - RNA, 21 nt, synthetic construct
  source 1..21: mol_type = other RNA
  modified_base 1: mod_base = OTHER; note = 2'-O-methylguanosine-3'-phosphorothioate
  modified_base 2: mod_base = OTHER; note = 2'-O-methylguanosine-3'-phosphorothioate
  modified_base 3: mod_base = OTHER; note = 2'-O-methyladenosine-3'-phosphate
  modified_base 4: mod_base = OTHER; note = 2'-O-methylcytidine-3'-phosphate
  modified_base 5: mod_base = OTHER; note = 2'-O-methyladenosine-3'-phosphate
  modified_base 6: mod_base = OTHER; note = 2'-O-methylcytidine-3'-phosphate
  modified_base 7: mod_base = OTHER; note = 2'-deoxy-2'-fluorocytidine-3'-phosphate
  modified_base 8: mod_base = OTHER; note = 2'-O-methyluridine-3'-phosphate
  modified_base 9: mod_base = OTHER; note = 2'-deoxy-2'-fluoroadenosine-3'-phosphate
  modified_base 10: mod_base = OTHER; note = 2'-deoxy-2'-fluorocytidine-3'-phosphate
  modified_base 11: mod_base = OTHER; note = 2'-deoxy-2'-fluorouridine-3'-phosphate
  modified_base 12: mod_base = OTHER; note = 2'-O-methyluridine-3'-phosphate
  modified_base 13: mod_base = OTHER; note = 2'-O-methylcytidine-3'-phosphate
  modified_base 14: mod_base = OTHER; note = 2'-O-methylguanosine-3'-phosphate
  modified_base 15: mod_base = OTHER; note = 2'-O-methyluridine-3'-phosphate
  modified_base 16: mod_base = OTHER; note = 2'-O-methylguanosine-3'-phosphate
  modified_base 17: mod_base = OTHER; note = 2'-O-methyladenosine-3'-phosphate
  modified_base 18: mod_base = OTHER; note = 2'-O-methylcytidine-3'-phosphate
  modified_base 19: mod_base = OTHER; note = 2'-O-methyladenosine-3'-phosphate
  modified_base 20: mod_base = OTHER; note = 2'-O-methylguanosine-3'-phosphate
  modified_base 21: mod_base = OTHER; note = 2'-O-methyluridine-3'-phosphate ((2S,4R)-1-[29-[[2-(acetylamino)-2-deoxy-beta-D-galactopyra nosyl]oxy]-14,14-bis[[3-[[3-[[5-[[2-(acetylamino)-2-deoxy-b eta-D-galactopyranosyl]oxy]-1-oxopentyl]amino]propyl]amino] -3-oxopropoxy]methyl]-1,12,19,25-tetraoxo-16-oxa-13,20,24-t riazanonacos-1-yl]-4-hydroxy-2-pyrrolidinyl)methyl ester
ggacacctacttcgtgacagt

SEQ ID NO: 282 - RNA, 21 nt, synthetic construct
  source 1..21: mol_type = other RNA
  modified_base 1: mod_base = OTHER; note = 2'-O-methylcytidine-3'-phosphorothioate
  modified_base 2: mod_base = OTHER; note = 2'-O-methylguanosine-3'-phosphorothioate
  modified_base 3: mod_base = OTHER; note = 2'-O-methyluridine-3'-phosphate
  modified_base 4: mod_base = OTHER; note = 2'-O-methylguanosine-3'-phosphate
  modified_base 5: mod_base = OTHER; note = 2'-O-methyladenosine-3'-phosphate
  modified_base 6: mod_base = OTHER; note = 2'-O-methylcytidine-3'-phosphate
  modified_base 7: mod_base = OTHER; note = 2'-deoxy-2'-fluoroadenosine-3'-phosphate
  modified_base 8: mod_base = OTHER; note = 2'-O-methylguanosine-3'-phosphate
  modified_base 9: mod_base = OTHER; note = 2'-deoxy-2'-fluoroguanosine-3'-phosphate
  modified_base 10: mod_base = OTHER; note = 2'-deoxy-2'-fluorocytidine-3'-phosphate
  modified_base 11: mod_base = OTHER; note = 2'-deoxy-2'-fluoroadenosine-3'-phosphate
  modified_base 12: mod_base = OTHER; note = 2'-O-methyluridine-3'-phosphate
  modified_base 13: mod_base = OTHER; note = 2'-O-methylcytidine-3'-phosphate
  modified_base 14: mod_base = OTHER; note = 2'-O-methylguanosine-3'-phosphate
  modified_base 15: mod_base = OTHER; note = 2'-O-methyluridine-3'-phosphate
  modified_base 16: mod_base = OTHER; note = 2'-O-methylcytidine-3'-phosphate
  modified_base 17: mod_base = OTHER; note = 2'-O-methyladenosine-3'-phosphate
  modified_base 18: mod_base = OTHER; note = 2'-O-methylguanosine-3'-phosphate
  modified_base 19: mod_base = OTHER; note = 2'-O-methylcytidine-3'-phosphate
  modified_base 20: mod_base = OTHER; note = 2'-O-methyluridine-3'-phosphate
  modified_base 21: mod_base = OTHER; note = 2'-O-methyluridine-3'-phosphate ((2S,4R)-1-[29-[[2-(acetylamino)-2-deoxy-beta-D-galactopyra nosyl]oxy]-14,14-bis[[3-[[3-[[5-[[2-(acetylamino)-2-deoxy-b eta-D-galactopyranosyl]oxy]-1-oxopentyl]amino]propyl]amino] -3-oxopropoxy]methyl]-1,12,19,25-tetraoxo-16-oxa-13,20,24-t riazanonacos-1-yl]-4-hydroxy-2-pyrrolidinyl)methyl ester
cgtgacaggcatcgtcagctt

SEQ ID NO: 283 - RNA, 21 nt, synthetic construct
  source 1..21: mol_type = other RNA
  modified_base 1: mod_base = OTHER; note = 2'-O-methyluridine-3'-phosphorothioate
  modified_base 2: mod_base = OTHER; note = 2'-O-methyladenosine-3'-phosphorothioate
  modified_base 3: mod_base = OTHER; note = 2'-O-methylcytidine-3'-phosphate
  modified_base 4: mod_base = OTHER; note = 2'-O-methylguanosine-3'-phosphate
  modified_base 5: mod_base = OTHER; note = 2'-O-methylguanosine-3'-phosphate
  modified_base 6: mod_base = OTHER; note = 2'-O-methylguanosine-3'-phosphate
  modified_base 7: mod_base = OTHER; note = 2'-deoxy-2'-fluoroadenosine-3'-phosphate
  modified_base 8: mod_base = OTHER; note = 2'-O-methyluridine-3'-phosphate
  modified_base 9: mod_base = OTHER; note = 2'-deoxy-2'-fluorocytidine-3'-phosphate
  modified_base 10: mod_base = OTHER; note = 2'-deoxy-2'-fluorouridine-3'-phosphate
  modified_base 11: mod_base = OTHER; note = 2'-deoxy-2'-fluoroadenosine-3'-phosphate
  modified_base 12: mod_base = OTHER; note = 2'-O-methylcytidine-3'-phosphate
  modified_base 13: mod_base = OTHER; note = 2'-O-methyladenosine-3'-phosphate
  modified_base 14: mod_base = OTHER; note = 2'-O-methylcytidine-3'-phosphate
  modified_base 15: mod_base = OTHER; note = 2'-O-methylcytidine-3'-phosphate
  modified_base 16: mod_base = OTHER; note = 2'-O-methyladenosine-3'-phosphate
  modified_base 17: mod_base = OTHER; note = 2'-O-methyladenosine-3'-phosphate
  modified_base 18: mod_base = OTHER; note = 2'-O-methylguanosine-3'-phosphate
  modified_base 19: mod_base = OTHER; note = 2'-O-methylguanosine-3'-phosphate
  modified_base 20: mod_base = OTHER; note = 2'-O-methyluridine-3'-phosphate
  modified_base 21: mod_base = OTHER; note = 2'-O-methyluridine-3'-phosphate ((2S,4R)-1-[29-[[2-(acetylamino)-2-deoxy-beta-D-galactopyra nosyl]oxy]-14,14-bis[[3-[[3-[[5-[[2-(acetylamino)-2-deoxy-b eta-D-galactopyranosyl]oxy]-1-oxopentyl]amino]propyl]amino] -3-oxopropoxy]methyl]-1,12,19,25-tetraoxo-16-oxa-13,20,24-t riazanonacos-1-yl]-4-hydroxy-2-pyrrolidinyl)methyl ester
tacgggatctacaccaaggtt

SEQ ID NO: 284 - RNA, 21 nt, synthetic construct
  source 1..21: mol_type = other RNA
  modified_base 1: mod_base = OTHER; note = 2'-O-methyluridine-3'-phosphorothioate
  modified_base 2: mod_base = OTHER; note = 2'-O-methyladenosine-3'-phosphorothioate
  modified_base 3: mod_base = OTHER; note = 2'-O-methylcytidine-3'-phosphate
  modified_base 4: mod_base = OTHER; note = 2'-O-methyladenosine-3'-phosphate
  modified_base 5: mod_base = OTHER; note = 2'-O-methylcytidine-3'-phosphate
  modified_base 6: mod_base = OTHER; note = 2'-O-methylcytidine-3'-phosphate
  modified_base 7: mod_base = OTHER; note = 2'-deoxy-2'-fluoroadenosine-3'-phosphate
  modified_base 8: mod_base = OTHER; note = 2'-O-methyladenosine-3'-phosphate
  modified_base 9: mod_base = OTHER; note = 2'-deoxy-2'-fluoroguanosine-3'-phosphate
  modified_base 10: mod_base = OTHER; note = 2'-deoxy-2'-fluoroguanosine-3'-phosphate
  modified_base 11: mod_base = OTHER; note = 2'-deoxy-2'-fluorouridine-3'-phosphate
  modified_base 12: mod_base = OTHER; note = 2'-O-methylcytidine-3'-phosphate
  modified_base 13: mod_base = OTHER; note = 2'-O-methyladenosine-3'-phosphate
  modified_base 14: mod_base = OTHER; note = 2'-O-methylcytidine-3'-phosphate
  modified_base 15: mod_base = OTHER; note = 2'-O-methylcytidine-3'-phosphate
  modified_base 16: mod_base = OTHER; note = 2'-O-methylguanosine-3'-phosphate
  modified_base 17: mod_base = OTHER; note = 2'-O-methylcytidine-3'-phosphate
  modified_base 18: mod_base = OTHER; note = 2'-O-methylcytidine-3'-phosphate
  modified_base 19: mod_base = OTHER; note = 2'-O-methyluridine-3'-phosphate
  modified_base 20: mod_base = OTHER; note = 2'-O-methyluridine-3'-phosphate
  modified_base 21: mod_base = OTHER; note = 2'-O-methyluridine-3'-phosphate ((2S,4R)-1-[29-[[2-(acetylamino)-2-deoxy-beta-D-galactopyra nosyl]oxy]-14,14-bis[[3-[[3-[[5-[[2-(acetylamino)-2-deoxy-b eta-D-galactopyranosyl]oxy]-1-oxopentyl]amino]propyl]amino] -3-oxopropoxy]methyl]-1,12,19,25-tetraoxo-16-oxa-13,20,24-t riazanonacos-1-yl]-4-hydroxy-2-pyrrolidinyl)methyl ester
tacaccaaggtcaccgccttt

SEQ ID NO: 285 - RNA, 21 nt, synthetic construct
  source 1..21: mol_type = other RNA
  modified_base 1: mod_base = OTHER; note = 2'-O-methylcytidine-3'-phosphorothioate
  modified_base 2: mod_base = OTHER; note = 2'-O-methylguanosine-3'-phosphorothioate
  modified_base 3: mod_base = OTHER; note = 2'-O-methylcytidine-3'-phosphate
  modified_base 4: mod_base = OTHER; note = 2'-O-methylcytidine-3'-phosphate
  modified_base 5: mod_base = OTHER; note = 2'-O-methyluridine-3'-phosphate
  modified_base 6: mod_base = OTHER; note = 2'-O-methyluridine-3'-phosphate
  modified_base 7: mod_base = OTHER; note = 2'-deoxy-2'-fluorocytidine-3'-phosphate
  modified_base 8: mod_base = OTHER; note = 2'-O-methylcytidine-3'-phosphate
  modified_base 9: mod_base = OTHER; note = 2'-deoxy-2'-fluorouridine-3'-phosphate
  modified_base 10: mod_base = OTHER; note = 2'-deoxy-2'-fluorocytidine-3'-phosphate
  modified_base 11: mod_base = OTHER; note = 2'-deoxy-2'-fluoroadenosine-3'-phosphate
  modified_base 12: mod_base = OTHER; note = 2'-O-methyladenosine-3'-phosphate
  modified_base 13: mod_base = OTHER; note = 2'-O-methylguanosine-3'-phosphate
  modified_base 14: mod_base = OTHER; note = 2'-O-methyluridine-3'-phosphate
  modified_base 15: mod_base = OTHER; note = 2'-O-methylguanosine-3'-phosphate
  modified_base 16: mod_base = OTHER; note = 2'-O-methylguanosine-3'-phosphate
  modified_base 17: mod_base = OTHER; note = 2'-O-methyladenosine-3'-phosphate
  modified_base 18: mod_base = OTHER; note = 2'-O-methyluridine-3'-phosphate
  modified_base 19: mod_base = OTHER; note = 2'-O-methylcytidine-3'-phosphate
  modified_base 20: mod_base = OTHER; note = 2'-O-methylguanosine-3'-phosphate
  modified_base 21: mod_base = OTHER; note = 2'-O-methyluridine-3'-phosphate ((2S,4R)-1-[29-[[2-(acetylamino)-2-deoxy-beta-D-galactopyra nosyl]oxy]-14,14-bis[[3-[[3-[[5-[[2-(acetylamino)-2-deoxy-b eta-D-galactopyranosyl]oxy]-1-oxopentyl]amino]propyl]amino] -3-oxopropoxy]methyl]-1,12,19,25-tetraoxo-16-oxa-13,20,24-t riazanonacos-1-yl]-4-hydroxy-2-pyrrolidinyl)methyl ester
cgccttcctcaagtggatcgt

SEQ ID NO: 286 - RNA, 21 nt, synthetic construct
  source 1..21: mol_type = other RNA
  modified_base 1: mod_base = OTHER; note = 2'-O-methylcytidine-3'-phosphorothioate
  modified_base 2: mod_base = OTHER; note = 2'-O-methyladenosine-3'-phosphorothioate
  modified_base 3: mod_base = OTHER; note = 2'-O-methyladenosine-3'-phosphate
  modified_base 4: mod_base = OTHER; note = 2'-O-methylguanosine-3'-phosphate
  modified_base 5: mod_base = OTHER; note = 2'-O-methyluridine-3'-phosphate
  modified_base 6: mod_base = OTHER; note = 2'-O-methylguanosine-3'-phosphate
  modified_base 7: mod_base = OTHER; note = 2'-deoxy-2'-fluoroguanosine-3'-phosphate
  modified_base 8: mod_base = OTHER; note = 2'-O-methyladenosine-3'-phosphate
  modified_base 9: mod_base = OTHER; note = 2'-deoxy-2'-fluorouridine-3'-phosphate
  modified_base 10: mod_base = OTHER; note = 2'-deoxy-2'-fluorocytidine-3'-phosphate
  modified_base 11: mod_base = OTHER; note = 2'-deoxy-2'-fluoroguanosine-3'-phosphate
  modified_base 12: mod_base = OTHER; note = 2'-O-methyladenosine-3'-phosphate
  modified_base 13: mod_base = OTHER; note = 2'-O-methylcytidine-3'-phosphate
  modified_base 14: mod_base = OTHER; note = 2'-O-methyladenosine-3'-phosphate
  modified_base 15: mod_base = OTHER; note = 2'-O-methylguanosine-3'-phosphate
  modified_base 16: mod_base = OTHER; note = 2'-O-methylguanosine-3'-phosphate
  modified_base 17: mod_base = OTHER; note = 2'-O-methyluridine-3'-phosphate
  modified_base 18: mod_base = OTHER; note = 2'-O-methylcytidine-3'-phosphate
  modified_base 19: mod_base = OTHER; note = 2'-O-methylcytidine-3'-phosphate
  modified_base 20: mod_base = OTHER; note = 2'-O-methyladenosine-3'-phosphate
  modified_base 21: mod_base = OTHER; note = 2'-O-methyluridine-3'-phosphate ((2S,4R)-1-[29-[[2-(acetylamino)-2-deoxy-beta-D-galactopyra nosyl]oxy]-14,14-bis[[3-[[3-[[5-[[2-(acetylamino)-2-deoxy-b eta-D-galactopyranosyl]oxy]-1-oxopentyl]amino]propyl]amino] -3-oxopropoxy]methyl]-1,12,19,25-tetraoxo-16-oxa-13,20,24-t riazanonacos-1-yl]-4-hydroxy-2-pyrrolidinyl)methyl ester
caagtggatcgacaggtccat

SEQ ID NO: 287 - RNA, 21 nt, synthetic construct
  source 1..21: mol_type = other RNA
  modified_base 1: mod_base = OTHER; note = 2'-O-methylcytidine-3'-phosphorothioate
  modified_base 2: mod_base = OTHER; note = 2'-O-methylguanosine-3'-phosphorothioate
  modified_base 3: mod_base = OTHER; note = 2'-O-methyladenosine-3'-phosphate
  modified_base 4: mod_base = OTHER; note = 2'-O-methylcytidine-3'-phosphate
  modified_base 5: mod_base = OTHER; note = 2'-O-methyladenosine-3'-phosphate
  modified_base 6: mod_base = OTHER; note = 2'-O-methylguanosine-3'-phosphate
  modified_base 7: mod_base = OTHER; note = 2'-deoxy-2'-fluoroguanosine-3'-phosphate
  modified_base 8: mod_base = OTHER; note = 2'-O-methyluridine-3'-phosphate
  modified_base 9: mod_base = OTHER; note = 2'-deoxy-2'-fluorocytidine-3'-phosphate
  modified_base 10: mod_base = OTHER; note = 2'-deoxy-2'-fluorocytidine-3'-phosphate
  modified_base 11: mod_base = OTHER; note = 2'-deoxy-2'-fluoroadenosine-3'-phosphate
  modified_base 12: mod_base = OTHER; note = 2'-O-methyluridine-3'-phosphate
  modified_base 13: mod_base = OTHER; note = 2'-O-methylguanosine-3'-phosphate
  modified_base 14: mod_base = OTHER; note = 2'-O-methyladenosine-3'-phosphate
  modified_base 15: mod_base = OTHER; note = 2'-O-methyladenosine-3'-phosphate
  modified_base 16: mod_base = OTHER; note = 2'-O-methyladenosine-3'-phosphate
  modified_base 17: mod_base = OTHER; note = 2'-O-methyladenosine-3'-phosphate
  modified_base 18: mod_base = OTHER; note = 2'-O-methylcytidine-3'-phosphate
  modified_base 19: mod_base = OTHER; note = 2'-O-methylcytidine-3'-phosphate
  modified_base 20: mod_base = OTHER; note = 2'-O-methyladenosine-3'-phosphate
  modified_base 21: mod_base = OTHER; note = 2'-O-methyluridine-3'-phosphate ((2S,4R)-1-[29-[[2-(acetylamino)-2-deoxy-beta-D-galactopyra nosyl]oxy]-14,14-bis[[3-[[3-[[5-[[2-(acetylamino)-2-deoxy-b eta-D-galactopyranosyl]oxy]-1-oxopentyl]amino]propyl]amino] -3-oxopropoxy]methyl]-1,12,19,25-tetraoxo-16-oxa-13,20,24-t riazanonacos-1-yl]-4-hydroxy-2-pyrrolidinyl)methyl ester
cgacaggtccatgaaaaccat

SEQ ID NO: 288 - RNA, 21 nt, synthetic construct
  source 1..21: mol_type = other RNA
  modified_base 1: mod_base = OTHER; note = 2'-O-methyluridine-3'-phosphorothioate
  modified_base 2: mod_base = OTHER; note = 2'-O-methyluridine-3'-phosphorothioate
  modified_base 3: mod_base = OTHER; note = 2'-O-methylguanosine-3'-phosphate
  modified_base 4: mod_base = OTHER; note = 2'-O-methylcytidine-3'-phosphate
  modified_base 5: mod_base = OTHER; note = 2'-O-methylcytidine-3'-phosphate
  modified_base 6: mod_base = OTHER; note = 2'-O-methylcytidine-3'-phosphate
  modified_base 7: mod_base = OTHER; note = 2'-deoxy-2'-fluoroadenosine-3'-phosphate
  modified_base 8: mod_base = OTHER; note = 2'-O-methyladenosine-3'-phosphate
  modified_base 9: mod_base = OTHER; note = 2'-deoxy-2'-fluoroguanosine-3'-phosphate
  modified_base 10: mod_base = OTHER; note = 2'-deoxy-2'-fluoroguanosine-3'-phosphate
  modified_base 11: mod_base = OTHER; note = 2'-deoxy-2'-fluorocytidine-3'-phosphate
  modified_base 12: mod_base = OTHER; note = 2'-O-methylcytidine-3'-phosphate
  modified_base 13: mod_base = OTHER; note = 2'-O-methyladenosine-3'-phosphate
  modified_base 14: mod_base = OTHER; note = 2'-O-methyladenosine-3'-phosphate
  modified_base 15: mod_base = OTHER; note = 2'-O-methylguanosine-3'-phosphate
  modified_base 16: mod_base = OTHER; note = 2'-O-methyladenosine-3'-phosphate
  modified_base 17: mod_base = OTHER; note = 2'-O-methylguanosine-3'-phosphate
  modified_base 18: mod_base = OTHER; note = 2'-O-methylcytidine-3'-phosphate
  modified_base 19: mod_base = OTHER; note = 2'-O-methylcytidine-3'-phosphate
  modified_base 20: mod_base = OTHER; note = 2'-O-methyladenosine-3'-phosphate
  modified_base 21: mod_base = OTHER; note = 2'-O-methyluridine-3'-phosphate ((2S,4R)-1-[29-[[2-(acetylamino)-2-deoxy-beta-D-galactopyra nosyl]oxy]-14,14-bis[[3-[[3-[[5-[[2-(acetylamino)-2-deoxy-b eta-D-galactopyranosyl]oxy]-1-oxopentyl]amino]propyl]amino] -3-oxopropoxy]methyl]-1,12,19,25-tetraoxo-16-oxa-13,20,24-t riazanonacos-1-yl]-4-hydroxy-2-pyrrolidinyl)methyl ester
ttgcccaaggccaagagccat

SEQ ID NO: 289 - RNA, 21 nt, synthetic construct
  source 1..21: mol_type = other RNA
  modified_base 1: mod_base = OTHER; note = 2'-O-methyluridine-3'-phosphorothioate
  modified_base 2: mod_base = OTHER; note = 2'-O-methylcytidine-3'-phosphorothioate
  modified_base 3: mod_base = OTHER; note = 2'-O-methyladenosine-3'-phosphate
  modified_base 4: mod_base = OTHER; note = 2'-O-methyluridine-3'-phosphate
  modified_base 5: mod_base = OTHER; note = 2'-O-methyladenosine-3'-phosphate
  modified_base 6: mod_base = OTHER; note = 2'-O-methyladenosine-3'-phosphate
  modified_base 7: mod_base = OTHER; note = 2'-deoxy-2'-fluorocytidine-3'-phosphate
  modified_base 8: mod_base = OTHER; note = 2'-O-methylguanosine-3'-phosphate
  modified_base 9: mod_base = OTHER; note = 2'-deoxy-2'-fluorouridine-3'-phosphate
  modified_base 10: mod_base = OTHER; note = 2'-deoxy-2'-fluorocytidine-3'-phosphate
  modified_base 11: mod_base = OTHER; note = 2'-deoxy-2'-fluorocytidine-3'-phosphate
  modified_base 12: mod_base = OTHER; note = 2'-O-methyluridine-3'-phosphate
  modified_base 13: mod_base = OTHER; note = 2'-O-methylcytidine-3'-phosphate
  modified_base 14: mod_base = OTHER; note = 2'-O-methyluridine-3'-phosphate
  modified_base 15: mod_base = OTHER; note = 2'-O-methylcytidine-3'-phosphate
  modified_base 16: mod_base = OTHER; note = 2'-O-methylcytidine-3'-phosphate
  modified_base 17: mod_base = OTHER; note = 2'-O-methyladenosine-3'-phosphate
  modified_base 18: mod_base = OTHER; note = 2'-O-methyluridine-3'-phosphate
  modified_base 19: mod_base = OTHER; note = 2'-O-methyluridine-3'-phosphate
  modified_base 20: mod_base = OTHER; note = 2'-O-methyladenosine-3'-phosphate
  modified_base 21: mod_base = OTHER; note = 2'-O-methyluridine-3'-phosphate ((2S,4R)-1-[29-[[2-(acetylamino)-2-deoxy-beta-D-galactopyra nosyl]oxy]-14,14-bis[[3-[[3-[[5-[[2-(acetylamino)-2-deoxy-b eta-D-galactopyranosyl]oxy]-1-oxopentyl]amino]propyl]amino] -3-oxopropoxy]methyl]-1,12,19,25-tetraoxo-16-oxa-13,20,24-t riazanonacos-1-yl]-4-hydroxy-2-pyrrolidinyl)methyl ester
tcataacgtcctctccattat

SEQ ID NO: 290 - RNA, 21 nt, synthetic construct
  source 1..21: mol_type = other RNA
  modified_base 1: mod_base = OTHER; note = 2'-O-methylcytidine-3'-phosphorothioate
  modified_base 2: mod_base = OTHER; note = 2'-O-methylcytidine-3'-phosphorothioate
  modified_base 3: mod_base = OTHER; note = 2'-O-methyluridine-3'-phosphate
  modified_base 4: mod_base = OTHER; note = 2'-O-methylcytidine-3'-phosphate
  modified_base 5: mod_base = OTHER; note = 2'-O-methyluridine-3'-phosphate
  modified_base 6: mod_base = OTHER; note = 2'-O-methylcytidine-3'-phosphate
  modified_base 7: mod_base = OTHER; note = 2'-deoxy-2'-fluorocytidine-3'-phosphate
  modified_base 8: mod_base = OTHER; note = 2'-O-methyladenosine-3'-phosphate
  modified_base 9: mod_base = OTHER; note = 2'-deoxy-2'-fluorouridine-3'-phosphate
  modified_base 10: mod_base = OTHER; note = 2'-deoxy-2'-fluorouridine-3'-phosphate
  modified_base 11: mod_base = OTHER; note = 2'-deoxy-2'-fluoroadenosine-3'-phosphate
  modified_base 12: mod_base = OTHER; note = 2'-O-methyladenosine-3'-phosphate
  modified_base 13: mod_base = OTHER; note = 2'-O-methyladenosine-3'-phosphate
  modified_base 14: mod_base = OTHER; note = 2'-O-methylguanosine-3'-phosphate
  modified_base 15: mod_base = OTHER; note = 2'-O-methyluridine-3'-phosphate
  modified_base 16: mod_base = OTHER; note = 2'-O-methylguanosine-3'-phosphate
  modified_base 17: mod_base = OTHER; note = 2'-O-methyladenosine-3'-phosphate
  modified_base 18: mod_base = OTHER; note = 2'-O-methylguanosine-3'-phosphate
  modified_base 19: mod_base = OTHER; note = 2'-O-methyladenosine-3'-phosphate
  modified_base 20: mod_base = OTHER; note = 2'-O-methyluridine-3'-phosphate
  modified_base 21: mod_base = OTHER; note = 2'-O-methyluridine-3'-phosphate ((2S,4R)-1-[29-[[2-(acetylamino)-2-deoxy-beta-D-galactopyra nosyl]oxy]-14,14-bis[[3-[[3-[[5-[[2-(acetylamino)-2-deoxy-b eta-D-galactopyranosyl]oxy]-1-oxopentyl]amino]propyl]amino] -3-oxopropoxy]methyl]-1,12,19,25-tetraoxo-16-oxa-13,20,24-t riazanonacos-1-yl]-4-hydroxy-2-pyrrolidinyl)methyl ester
cctctccattaaagtgagatt

SEQ ID NO: 291 - RNA, 23 nt, synthetic construct
  source 1..23: mol_type = other RNA
  modified_base 1: mod_base = OTHER; note = 2'-O-methyladenosine-3'-phosphorothioate
  modified_base 2: mod_base = OTHER; note = 2'-deoxy-2'-fluoroadenosine-3'-phosphorothioate
  modified_base 3: mod_base = OTHER; note = 2'-O-methylcytidine-3'-phosphate
  modified_base 4: mod_base = OTHER; note = 2'-O-methyluridine-3'-phosphate
  modified_base 5: mod_base = OTHER; note = 2'-O-methylguanosine-3'-phosphate
  modified_base 6: mod_base = OTHER; note = 2'-deoxy-2'-fluoroguanosine-3'-phosphate
  modified_base 7: mod_base = OTHER; note = 2'-O-methylguanosine-3'-phosphate
  modified_base 8: mod_base = OTHER; note = 2'-deoxy-2'-fluoroadenosine-3'-phosphate
  modified_base 9: mod_base = OTHER; note = 2'-deoxy-2'-fluorocytidine-3'-phosphate
  modified_base 10: mod_base = OTHER; note = 2'-O-methyladenosine-3'-phosphate
  modified_base 11: mod_base = OTHER; note = 2'-O-methylguanosine-3'-phosphate
  modified_base 12: mod_base = OTHER; note = 2'-O-methylguanosine-3'-phosphate
  modified_base 13: mod_base = OTHER; note = 2'-O-methylcytidine-3'-phosphate
  modified_base 14: mod_base = OTHER; note = 2'-deoxy-2'-fluorouridine-3'-phosphate
  modified_base 15: mod_base = OTHER; note = 2'-O-methylguanosine-3'-phosphate
  modified_base 16: mod_base = OTHER; note = 2'-deoxy-2'-fluorocytidine-3'-phosphate
  modified_base 17: mod_base = OTHER; note = 2'-O-methyluridine-3'-phosphate
  modified_base 18: mod_base = OTHER; note = 2'-O-methylguanosine-3'-phosphate
  modified_base 19: mod_base = OTHER; note = 2'-O-methylguanosine-3'-phosphate
  modified_base 20: mod_base = OTHER; note = 2'-O-methyladenosine-3'-phosphate
  modified_base 21: mod_base = OTHER; note = 2'-O-methylguanosine-3'-phosphorothioate
  modified_base 22: mod_base = OTHER; note = 2'-O-methylcytidine-3'-phosphorothioate
  modified_base 23: mod_base = OTHER; note = 2'-O-methyladenosine
aactgggacaggctgctggagca

SEQ ID NO: 292 - RNA, 23 nt, synthetic construct
  source 1..23: mol_type = other RNA
  modified_base 1: mod_base = OTHER; note = 2'-O-methyladenosine-3'-phosphorothioate
  modified_base 2: mod_base = OTHER; note = 2'-deoxy-2'-fluorouridine-3'-phosphorothioate
  modified_base 3: mod_base = OTHER; note = 2'-O-methylcytidine-3'-phosphate
  modified_base 4: mod_base = OTHER; note = 2'-O-methylcytidine-3'-phosphate
  modified_base 5: mod_base = OTHER; note = 2'-O-methylcytidine-3'-phosphate
  modified_base 6: mod_base = OTHER; note = 2'-deoxy-2'-fluorouridine-3'-phosphate
  modified_base 7: mod_base = OTHER; note = 2'-O-methylguanosine-3'-phosphate
  modified_base 8: mod_base = OTHER; note = 2'-deoxy-2'-fluorouridine-3'-phosphate
  modified_base 9: mod_base = OTHER; note = 2'-deoxy-2'-fluorocytidine-3'-phosphate
  modified_base 10: mod_base = OTHER; note = 2'-O-methylcytidine-3'-phosphate
  modified_base 11: mod_base = OTHER; note = 2'-O-methyluridine-3'-phosphate
  modified_base 12: mod_base = OTHER; note = 2'-O-methylcytidine-3'-phosphate
  modified_base 13: mod_base = OTHER; note = 2'-O-methyladenosine-3'-phosphate
  modified_base 14: mod_base = OTHER; note = 2'-deoxy-2'-fluorocytidine-3'-phosphate
  modified_base 15: mod_base = OTHER; note = 2'-O-methyluridine-3'-phosphate
  modified_base 16: mod_base = OTHER; note = 2'-deoxy-2'-fluoroguanosine-3'-phosphate
  modified_base 17: mod_base = OTHER; note = 2'-O-methylguanosine-3'-phosphate
  modified_base 18: mod_base = OTHER; note = 2'-O-methylguanosine-3'-phosphate
  modified_base 19: mod_base = OTHER; note = 2'-O-methyladenosine-3'-phosphate
  modified_base 20: mod_base = OTHER; note = 2'-O-methylcytidine-3'-phosphate
  modified_base 21: mod_base = OTHER; note = 2'-O-methyladenosine-3'-phosphorothioate
  modified_base 22: mod_base = OTHER; note = 2'-O-methylguanosine-3'-phosphorothioate
  modified_base 23: mod_base = OTHER; note = 2'-O-methylguanosine
atccctgtcctcactgggacagg

SEQ ID NO: 293 - RNA, 23 nt, synthetic construct
  source 1..23: mol_type = other RNA
  modified_base 1: mod_base = OTHER; note = 2'-O-methyladenosine-3'-phosphorothioate
  modified_base 2: mod_base = OTHER; note = 2'-deoxy-2'-fluorouridine-3'-phosphorothioate
  modified_base 3: mod_base = OTHER; note = 2'-O-methylguanosine-3'-phosphate
  modified_base 4: mod_base = OTHER; note = 2'-O-methylguanosine-3'-phosphate
  modified_base 5: mod_base = OTHER; note = 2'-O-methylcytidine-3'-phosphate
  modified_base 6: mod_base = OTHER; note = 2'-deoxy-2'-fluorocytidine-3'-phosphate
  modified_base 7: mod_base = OTHER; note = 2'-O-methylguanosine-3'-phosphate
  modified_base 8: mod_base = OTHER; note = 2'-deoxy-2'-fluoroadenosine-3'-phosphate
  modified_base 9: mod_base = OTHER; note = 2'-deoxy-2'-fluoroguanosine-3'-phosphate
  modified_base 10: mod_base = OTHER; note = 2'-O-methyluridine-3'-phosphate
  modified_base 11: mod_base = OTHER; note = 2'-O-methyladenosine-3'-phosphate
  modified_base 12: mod_base = OTHER; note = 2'-O-methylcytidine-3'-phosphate
  modified_base 13: mod_base = OTHER; note = 2'-O-methyluridine-3'-phosphate
  modified_base 14: mod_base = OTHER; note = 2'-deoxy-2'-fluoroguanosine-3'-phosphate
  modified_base 15: mod_base = OTHER; note = 2'-O-methyluridine-3'-phosphate
  modified_base 16: mod_base = OTHER; note = 2'-deoxy-2'-fluoroguanosine-3'-phosphate
  modified_base 17: mod_base = OTHER; note = 2'-O-methyluridine-3'-phosphate
  modified_base 18: mod_base = OTHER; note = 2'-O-methylcytidine-3'-phosphate
  modified_base 19: mod_base = OTHER; note = 2'-O-methylcytidine-3'-phosphate
  modified_base 20: mod_base = OTHER; note = 2'-O-methylcytidine-3'-phosphate
  modified_base 21: mod_base = OTHER; note = 2'-O-methyluridine-3'-phosphorothioate
  modified_base 22: mod_base = OTHER; note = 2'-O-methylguanosine-3'-phosphorothioate
  modified_base 23: mod_base = OTHER; note = 2'-O-methyluridine
atggccgagtactgtgtccctgt

SEQ ID NO: 294 - RNA, 23 nt, synthetic construct
  source 1..23: mol_type = other RNA
  modified_base 1: mod_base = OTHER; note = 2'-O-methyladenosine-3'-phosphorothioate
  modified_base 2: mod_base = OTHER; note = 2'-deoxy-2'-fluoroadenosine-3'-phosphorothioate
  modified_base 3: mod_base = OTHER; note = 2'-O-methylguanosine-3'-phosphate
  modified_base 4: mod_base = OTHER; note = 2'-O-methylguanosine-3'-phosphate
  modified_base 5: mod_base = OTHER; note = 2'-O-methylcytidine-3'-phosphate
  modified_base 6: mod_base = OTHER; note = 2'-deoxy-2'-fluoroadenosine-3'-phosphate
  modified_base 7: mod_base = OTHER; note = 2'-O-methylcytidine-3'-phosphate
  modified_base 8: mod_base = OTHER; note = 2'-deoxy-2'-fluorouridine-3'-phosphate
  modified_base 9: mod_base = OTHER; note = 2'-deoxy-2'-fluoroguanosine-3'-phosphate
  modified_base 10: mod_base = OTHER; note = 2'-O-methyladenosine-3'-phosphate
  modified_base 11: mod_base = OTHER; note = 2'-O-methylguanosine-3'-phosphate
  modified_base 12: mod_base = OTHER; note = 2'-O-methylcytidine-3'-phosphate
  modified_base 13: mod_base = OTHER; note = 2'-O-methyladenosine-3'-phosphate
  modified_base 14: mod_base = OTHER; note = 2'-deoxy-2'-fluoroguanosine-3'-phosphate
  modified_base 15: mod_base = OTHER; note = 2'-O-methylguanosine-3'-phosphate
  modified_base 16: mod_base = OTHER; note = 2'-deoxy-2'-fluoroadenosine-3'-phosphate
  modified_base 17: mod_base = OTHER; note = 2'-O-methylcytidine-3'-phosphate
  modified_base 18: mod_base = OTHER; note = 2'-O-methylguanosine-3'-phosphate
  modified_base 19: mod_base = OTHER; note = 2'-O-methyladenosine-3'-phosphate
  modified_base 20: mod_base = OTHER; note = 2'-O-methylguanosine-3'-phosphate
  modified_base 21: mod_base = OTHER; note = 2'-O-methylguanosine-3'-phosphorothioate
  modified_base 22: mod_base = OTHER; note = 2'-O-methyluridine-3'-phosphorothioate
  modified_base 23: mod_base = OTHER; note = 2'-O-methylguanosine
aaggcactgagcaggacgaggtg

SEQ ID NO: 295 - RNA, 23 nt, synthetic construct
  source 1..23: mol_type = other RNA
  modified_base 1: mod_base = OTHER; note = 2'-O-methyladenosine-3'-phosphorothioate
  modified_base 2: mod_base = OTHER; note = 2'-deoxy-2'-fluorocytidine-3'-phosphorothioate
  modified_base 3: mod_base = OTHER; note = 2'-O-methyluridine-3'-phosphate
  modified_base 4: mod_base = OTHER; note = 2'-O-methylguanosine-3'-phosphate
  modified_base 5: mod_base = OTHER; note = 2'-O-methylcytidine-3'-phosphate
  modified_base 6: mod_base = OTHER; note = 2'-deoxy-2'-fluoroguanosine-3'-phosphate
  modified_base 7: mod_base = OTHER; note = 2'-O-methylguanosine-3'-phosphate
  modified_base 8: mod_base = OTHER; note = 2'-deoxy-2'-fluoroadenosine-3'-phosphate
  modified_base 9: mod_base = OTHER; note = 2'-deoxy-2'-fluorouridine-3'-phosphate
  modified_base 10: mod_base = OTHER; note = 2'-O-methylguanosine-3'-phosphate
  modified_base 11: mod_base = OTHER; note = 2'-O-methyladenosine-3'-phosphate
  modified_base 12: mod_base = OTHER; note = 2'-O-methyladenosine-3'-phosphate
  modified_base 13: mod_base = OTHER; note = 2'-O-methylcytidine-3'-phosphate
  modified_base 14: mod_base = OTHER; note = 2'-deoxy-2'-fluoroadenosine-3'-phosphate
  modified_base 15: mod_base = OTHER; note = 2'-O-methylguanosine-3'-phosphate
  modified_base 16: mod_base = OTHER; note = 2'-deoxy-2'-fluoroadenosine-3'-phosphate
  modified_base 17: mod_base = OTHER; note = 2'-O-methylcytidine-3'-phosphate
  modified_base 18: mod_base = OTHER; note = 2'-O-methyluridine-3'-phosphate
  modified_base 19: mod_base = OTHER; note = 2'-O-methyluridine-3'-phosphate
  modified_base 20: mod_base = OTHER; note = 2'-O-methyluridine-3'-phosphate
  modified_base 21: mod_base = OTHER; note = 2'-O-methylcytidine-3'-phosphorothioate
  modified_base 22: mod_base = OTHER; note = 2'-O-methylcytidine-3'-phosphorothioate
  modified_base 23: mod_base = OTHER; note = 2'-O-methylcytidine
actgcggatgaacagactttccc

SEQ ID NO: 296 - RNA, 23 nt, synthetic construct
  source 1..23: mol_type = other RNA
  modified_base 1: mod_base = OTHER; note = 2'-O-methyladenosine-3'-phosphorothioate
  modified_base 2: mod_base = OTHER; note = 2'-deoxy-2'-fluorouridine-3'-phosphorothioate
  modified_base 3: mod_base = OTHER; note = 2'-O-methylguanosine-3'-phosphate
  modified_base 4: mod_base = OTHER; note = 2'-O-methyluridine-3'-phosphate
  modified_base 5: mod_base = OTHER; note = 2'-O-methyluridine-3'-phosphate
  modified_base 6: mod_base = OTHER; note = 2'-deoxy-2'-fluoroguanosine-3'-phosphate
  modified_base 7: mod_base = OTHER; note = 2'-O-methylguanosine-3'-phosphate
  modified_base 8: mod_base = OTHER; note = 2'-deoxy-2'-fluorocytidine-3'-phosphate
  modified_base 9: mod_base = OTHER; note = 2'-deoxy-2'-fluorocytidine-3'-phosphate
  modified_base 10: mod_base = OTHER; note = 2'-O-methyluridine-3'-phosphate
  modified_base 11: mod_base = OTHER; note = 2'-O-methylguanosine-3'-phosphate
  modified_base 12: mod_base = OTHER; note = 2'-O-methylcytidine-3'-phosphate
  modified_base 13: mod_base = OTHER; note = 2'-O-methyluridine-3'-phosphate
  modified_base 14: mod_base = OTHER; note = 2'-deoxy-2'-fluorocytidine-3'-phosphate
  modified_base 15: mod_base = OTHER; note = 2'-O-methylcytidine-3'-phosphate
  modified_base 16: mod_base = OTHER; note = 2'-deoxy-2'-fluorocytidine-3'-phosphate
  modified_base 17: mod_base = OTHER; note = 2'-O-methyluridine-3'-phosphate
  modified_base 18: mod_base = OTHER; note = 2'-O-methylguanosine-3'-phosphate
  modified_base 19: mod_base = OTHER; note = 2'-O-methylcytidine-3'-phosphate
  modified_base 20: mod_base = OTHER; note = 2'-O-methylguanosine-3'-phosphate
  modified_base 21: mod_base = OTHER; note = 2'-O-methylguanosine-3'-phosphorothioate
  modified_base 22: mod_base = OTHER; note = 2'-O-methyladenosine-3'-phosphorothioate
  modified_base 23: mod_base = OTHER; note = 2'-O-methyluridine
atgttggcctgctccctgcggat

SEQ ID NO: 297 - RNA, 23 nt, synthetic construct
  source 1..23: mol_type = other RNA
  modified_base 1: mod_base = OTHER; note = 2'-O-methyladenosine-3'-phosphorothioate
  modified_base 2: mod_base = OTHER; note = 2'-deoxy-2'-fluorocytidine-3'-phosphorothioate
  modified_base 3: mod_base = OTHER; note = 2'-O-methylcytidine-3'-phosphate
  modified_base 4: mod_base = OTHER; note = 2'-O-methyladenosine-3'-phosphate
  modified_base 5: mod_base = OTHER; note = 2'-O-methylguanosine-3'-phosphate
  modified_base 6: mod_base = OTHER; note = 2'-deoxy-2'-fluoroguanosine-3'-phosphate
  modified_base 7: mod_base = OTHER; note = 2'-O-methyladenosine-3'-phosphate
  modified_base 8: mod_base = OTHER; note = 2'-deoxy-2'-fluorouridine-3'-phosphate
  modified_base 9: mod_base = OTHER; note = 2'-deoxy-2'-fluoroguanosine-3'-phosphate
  modified_base 10: mod_base = OTHER; note = 2'-O-methyluridine-3'-phosphate
  modified_base 11: mod_base = OTHER; note = 2'-O-methyluridine-3'-phosphate
  modified_base 12: mod_base = OTHER; note = 2'-O-methylguanosine-3'-phosphate
  modified_base 13: mod_base = OTHER; note = 2'-O-methyluridine-3'-phosphate
  modified_base 14: mod_base = OTHER; note = 2'-deoxy-2'-fluorouridine-3'-phosphate
  modified_base 15: mod_base = OTHER; note = 2'-O-methylguanosine-3'-phosphate
  modified_base 16: mod_base = OTHER; note = 2'-deoxy-2'-fluoroguanosine-3'-phosphate
  modified_base 17: mod_base = OTHER; note = 2'-O-methylcytidine-3'-phosphate
  modified_base 18: mod_base = OTHER; note = 2'-O-methylcytidine-3'-phosphate
  modified_base 19: mod_base = OTHER; note = 2'-O-methyluridine-3'-phosphate
  modified_base 20: mod_base = OTHER; note = 2'-O-methylguanosine-3'-phosphate
  modified_base 21: mod_base = OTHER; note = 2'-O-methylcytidine-3'-phosphorothioate
  modified_base 22: mod_base = OTHER; note = 2'-O-methyluridine-3'-phosphorothioate
  modified_base 23: mod_base = OTHER; note = 2'-O-methylcytidine
accaggatgttgttggcctgctc

SEQ ID NO: 298 - RNA, 23 nt, synthetic construct
  source 1..23: mol_type = other RNA
  modified_base 1: mod_base = OTHER; note = 2'-O-methyladenosine-3'-phosphorothioate
  modified_base 2: mod_base = OTHER; note = 2'-deoxy-2'-fluorocytidine-3'-phosphorothioate
  modified_base 3: mod_base = OTHER; note = 2'-O-methyluridine-3'-phosphate
  modified_base 4: mod_base = OTHER; note = 2'-O-methylcytidine-3'-phosphate
  modified_base 5: mod_base = OTHER; note = 2'-O-methylguanosine-3'-phosphate
  modified_base 6: mod_base = OTHER; note = 2'-deoxy-2'-fluorouridine-3'-phosphate
  modified_base 7: mod_base = OTHER; note = 2'-O-methylguanosine-3'-phosphate
  modified_base 8: mod_base = OTHER; note = 2'-deoxy-2'-fluoroadenosine-3'-phosphate
  modified_base 9: mod_base = OTHER; note = 2'-deoxy-2'-fluorocytidine-3'-phosphate
  modified_base 10: mod_base = OTHER; note = 2'-O-methylcytidine-3'-phosphate
  modified_base 11: mod_base = OTHER; note = 2'-O-methylcytidine-3'-phosphate
  modified_base 12: mod_base = OTHER; note = 2'-O-methyluridine-3'-phosphate
  modified_base 13: mod_base = OTHER; note = 2'-O-methylcytidine-3'-phosphate
  modified_base 14: mod_base = OTHER; note = 2'-deoxy-2'-fluoroguanosine-3'-phosphate
  modified_base 15: mod_base = OTHER; note = 2'-O-methylcytidine-3'-phosphate
  modified_base 16: mod_base = OTHER; note = 2'-deoxy-2'-fluorocytidine-3'-phosphate
  modified_base 17: mod_base = OTHER; note = 2'-O-methyladenosine-3'-phosphate
  modified_base 18: mod_base = OTHER; note = 2'-O-methylguanosine-3'-phosphate
  modified_base 19: mod_base = OTHER; note = 2'-O-methylguanosine-3'-phosphate
  modified_base 20: mod_base = OTHER; note = 2'-O-methyladenosine-3'-phosphate
  modified_base 21: mod_base = OTHER; note = 2'-O-methyluridine-3'-phosphorothioate
  modified_base 22: mod_base = OTHER; note = 2'-O-methylguanosine-3'-phosphorothioate
  modified_base 23: mod_base = OTHER; note = 2'-O-methyluridine
actcgtgaccctcgccaggatgt

SEQ ID NO: 299 - RNA, 23 nt, synthetic construct
  source 1..23: mol_type = other RNA
  modified_base 1: mod_base = OTHER; note = 2'-O-methyladenosine-3'-phosphorothioate
  modified_base 2: mod_base = OTHER; note = 2'-deoxy-2'-fluoroadenosine-3'-phosphorothioate
  modified_base 3: mod_base = OTHER; note = 2'-O-methyladenosine-3'-phosphate
  modified_base 4: mod_base = OTHER; note = 2'-O-methyladenosine-3'-phosphate
  modified_base 5: mod_base = OTHER; note = 2'-O-methylguanosine-3'-phosphate
  modified_base 6: mod_base = OTHER; note = 2'-deoxy-2'-fluoroguanosine-3'-phosphate
  modified_base 7: mod_base = OTHER; note = 2'-O-methyladenosine-3'-phosphate
  modified_base 8: mod_base = OTHER; note = 2'-deoxy-2'-fluoroadenosine-3'-phosphate
  modified_base 9: mod_base = OTHER; note = 2'-deoxy-2'-fluorouridine-3'-phosphate
  modified_base 10: mod_base = OTHER; note = 2'-O-methyluridine-3'-phosphate
  modified_base 11: mod_base = OTHER; note = 2'-O-methylguanosine-3'-phosphate
  modified_base 12: mod_base = OTHER; note = 2'-O-methylguanosine-3'-phosphate
  modified_base 13: mod_base = OTHER; note = 2'-O-methylcytidine-3'-phosphate
  modified_base 14: mod_base = OTHER; note = 2'-deoxy-2'-fluorocytidine-3'-phosphate
  modified_base 15: mod_base = OTHER; note = 2'-O-methylcytidine-3'-phosphate
  modified_base 16: mod_base = OTHER; note = 2'-deoxy-2'-fluorouridine-3'-phosphate
  modified_base 17: mod_base = OTHER; note = 2'-O-methylcytidine-3'-phosphate
  modified_base 18: mod_base = OTHER; note = 2'-O-methylguanosine-3'-phosphate
  modified_base 19: mod_base = OTHER; note = 2'-O-methyluridine-3'-phosphate
  modified_base 20: mod_base = OTHER; note = 2'-O-methylguanosine-3'-phosphate
  modified_base 21: mod_base = OTHER; note = 2'-O-methyladenosine-3'-phosphorothioate
  modified_base 22: mod_base = OTHER; note = 2'-O-methylcytidine-3'-phosphorothioate
  modified_base 23: mod_base = OTHER; note = 2'-O-methylcytidine
aaaaggaattggccctcgtgacc

SEQ ID NO: 300 - RNA, 23 nt, synthetic construct
  source 1..23: mol_type = other RNA
  modified_base 1: mod_base = OTHER; note = 2'-O-methyladenosine-3'-phosphorothioate
  modified_base 2: mod_base = OTHER; note = 2'-deoxy-2'-fluorocytidine-3'-phosphorothioate
  modified_base 3: mod_base = OTHER; note = 2'-O-methyluridine-3'-phosphate
  modified_base 4: mod_base = OTHER; note = 2'-O-methylcytidine-3'-phosphate
  modified_base 5: mod_base = OTHER; note = 2'-O-methyluridine-3'-phosphate
  modified_base 6: mod_base = OTHER; note = 2'-deoxy-2'-fluorouridine-3'-phosphate
  modified_base 7: mod_base = OTHER; note = 2'-O-methylcytidine-3'-phosphate
  modified_base 8: mod_base = OTHER; note = 2'-deoxy-2'-fluoroadenosine-3'-phosphate
  modified_base 9: mod_base = OTHER; note = 2'-deoxy-2'-fluoroadenosine-3'-phosphate
  modified_base 10: mod_base = OTHER; note = 2'-O-methylguanosine-3'-phosphate
  modified_base 11: mod_base = OTHER; note = 2'-O-methyladenosine-3'-phosphate
  modified_base 12: mod_base = OTHER; note = 2'-O-methyladenosine-3'-phosphate
  modified_base 13: mod_base = OTHER; note = 2'-O-methyladenosine-3'-phosphate
  modified_base 14: mod_base = OTHER; note = 2'-deoxy-2'-fluoroguanosine-3'-phosphate
  modified_base 15: mod_base = OTHER; note = 2'-O-methylguanosine-3'-phosphate
  modified_base 16: mod_base = OTHER; note = 2'-deoxy-2'-fluoroadenosine-3'-phosphate
  modified_base 17: mod_base = OTHER; note = 2'-O-methyladenosine-3'-phosphate
  modified_base 18: mod_base = OTHER; note = 2'-O-methyluridine-3'-phosphate
  modified_base 19: mod_base = OTHER; note = 2'-O-methyluridine-3'-phosphate
  modified_base 20: mod_base = OTHER; note = 2'-O-methylguanosine-3'-phosphate
  modified_base 21: mod_base = OTHER; note = 2'-O-methylguanosine-3'-phosphorothioate
  modified_base 22: mod_base = OTHER; note = 2'-O-methylcytidine-3'-phosphorothioate
  modified_base 23: mod_base = OTHER; note = 2'-O-methylcytidine
actcttcaagaaaggaattggcc

SEQ ID NO: 301 - RNA, 23 nt, synthetic construct
  source 1..23: mol_type = other RNA
  modified_base 1: mod_base = OTHER; note = 2'-O-methyladenosine-3'-phosphorothioate
  modified_base 2: mod_base = OTHER; note = 2'-deoxy-2'-fluorouridine-3'-phosphorothioate
  modified_base 3: mod_base = OTHER; note = 2'-O-methyluridine-3'-phosphate
  modified_base 4: mod_base = OTHER; note = 2'-O-methyluridine-3'-phosphate
  modified_base 5: mod_base = OTHER; note = 2'-O-methylcytidine-3'-phosphate
  modified_base 6: mod_base = OTHER; note = 2'-deoxy-2'-fluorouridine-3'-phosphate
  modified_base 7: mod_base = OTHER; note = 2'-O-methyluridine-3'-phosphate
  modified_base 8: mod_base = OTHER; note = 2'-deoxy-2'-fluorocytidine-3'-phosphate
  modified_base 9: mod_base = OTHER; note = 2'-deoxy-2'-fluoroadenosine-3'-phosphate
  modified_base 10: mod_base = OTHER; note = 2'-O-methyluridine-3'-phosphate
  modified_base 11: mod_base = OTHER; note = 2'-O-methylcytidine-3'-phosphate
  modified_base 12: mod_base = OTHER; note = 2'-O-methyluridine-3'-phosphate
  modified_base 13: mod_base = OTHER; note = 2'-O-methylcytidine-3'-phosphate
  modified_base 14: mod_base = OTHER; note = 2'-deoxy-2'-fluorouridine-3'-phosphate
  modified_base 15: mod_base = OTHER; note = 2'-O-methyluridine-3'-phosphate
  modified_base 16: mod_base = OTHER; note = 2'-deoxy-2'-fluorocytidine-3'-phosphate
  modified_base 17: mod_base = OTHER; note = 2'-O-methyladenosine-3'-phosphate
  modified_base 18: mod_base = OTHER; note = 2'-O-methyladenosine-3'-phosphate
  modified_base 19: mod_base = OTHER; note = 2'-O-methylguanosine-3'-phosphate
  modified_base 20: mod_base = OTHER; note = 2'-O-methyladenosine-3'-phosphate
  modified_base 21: mod_base = OTHER; note = 2'-O-methyladenosine-3'-phosphorothioate
  modified_base 22: mod_base = OTHER; note = 2'-O-methyladenosine-3'-phosphorothioate
  modified_base 23: mod_base = OTHER; note = 2'-O-methylguanosine
atttcttcatctcttcaagaaag

SEQ ID NO: 302 - RNA, 23 nt, synthetic construct
  source 1..23: mol_type = other RNA
  modified_base 1: mod_base = OTHER; note = 2'-O-methyladenosine-3'-phosphorothioate
  modified_base 2: mod_base = OTHER; note = 2'-deoxy-2'-fluorouridine-3'-phosphorothioate
  modified_base 3: mod_base = OTHER; note = 2'-O-methylcytidine-3'-phosphate
  modified_base 4: mod_base = OTHER; note = 2'-O-methyluridine-3'-phosphate
  modified_base 5: mod_base = OTHER; note = 2'-O-methyluridine-3'-phosphate
  modified_base 6: mod_base = OTHER; note = 2'-deoxy-2'-fluorouridine-3'-phosphate
  modified_base 7: mod_base = OTHER; note = 2'-O-methylcytidine-3'-phosphate
  modified_base 8: mod_base = OTHER; note = 2'-deoxy-2'-fluoroguanosine-3'-phosphate
  modified_base 9: mod_base = OTHER; note = 2'-deoxy-2'-fluoroadenosine-3'-phosphate
  modified_base 10: mod_base = OTHER; note = 2'-O-methylguanosine-3'-phosphate
  modified_base 11: mod_base = OTHER; note = 2'-O-methylguanosine-3'-phosphate
  modified_base 12: mod_base = OTHER; note = 2'-O-methyluridine-3'-phosphate
  modified_base 13: mod_base = OTHER; note = 2'-O-methylguanosine-3'-phosphate
  modified_base 14: mod_base = OTHER; note = 2'-deoxy-2'-fluorouridine-3'-phosphate
  modified_base 15: mod_base = OTHER; note = 2'-O-methylcytidine-3'-phosphate
  modified_base 16: mod_base = OTHER; note = 2'-deoxy-2'-fluorocytidine-3'-phosphate
  modified_base 17: mod_base = OTHER; note = 2'-O-methyluridine-3'-phosphate
  modified_base 18: mod_base = OTHER; note = 2'-O-methyluridine-3'-phosphate
  modified_base 19: mod_base = OTHER; note = 2'-O-methyluridine-3'-phosphate
  modified_base 20: mod_base = OTHER; note = 2'-O-methylcytidine-3'-phosphate
  modified_base 21: mod_base = OTHER; note = 2'-O-methyluridine-3'-phosphorothioate
  modified_base 22: mod_base = OTHER; note = 2'-O-methyluridine-3'-phosphorothioate
  modified_base 23: mod_base = OTHER; note = 2'-O-methylcytidine
atctttcgaggtgtcctttcttc

SEQ ID NO: 303 - RNA, 23 nt, synthetic construct
  source 1..23: mol_type = other RNA
  modified_base 1: mod_base = OTHER; note = 2'-O-methyladenosine-3'-phosphorothioate
  modified_base 2: mod_base = OTHER; note = 2'-deoxy-2'-fluorocytidine-3'-phosphorothioate
  modified_base 3: mod_base = OTHER; note = 2'-O-methyladenosine-3'-phosphate
  modified_base 4: mod_base = OTHER; note = 2'-O-methyluridine-3'-phosphate
  modified_base 5: mod_base = OTHER; note = 2'-O-methylguanosine-3'-phosphate
  modified_base 6: mod_base = OTHER; note = 2'-deoxy-2'-fluorocytidine-3'-phosphate
  modified_base 7: mod_base = OTHER; note = 2'-O-methyladenosine-3'-phosphate
  modified_base 8: mod_base = OTHER; note = 2'-deoxy-2'-fluorocytidine-3'-phosphate
  modified_base 9: mod_base = OTHER; note = 2'-deoxy-2'-fluorouridine-3'-phosphate
  modified_base 10: mod_base = OTHER; note = 2'-O-methylcytidine-3'-phosphate
  modified_base 11: mod_base = OTHER; note = 2'-O-methyluridine-3'-phosphate
  modified_base 12: mod_base = OTHER; note = 2'-O-methylcytidine-3'-phosphate
  modified_base 13: mod_base = OTHER; note = 2'-O-methyluridine-3'-phosphate
  modified_base 14: mod_base = OTHER; note = 2'-deoxy-2'-fluorouridine-3'-phosphate
  modified_base 15: mod_base = OTHER; note = 2'-O-methyluridine-3'-phosphate
  modified_base 16: mod_base = OTHER; note = 2'-deoxy-2'-fluorocytidine-3'-phosphate
  modified_base 17: mod_base = OTHER; note = 2'-O-methylguanosine-3'-phosphate
  modified_base 18: mod_base = OTHER; note = 2'-O-methyladenosine-3'-phosphate
  modified_base 19: mod_base = OTHER; note = 2'-O-methylguanosine-3'-phosphate
  modified_base 20: mod_base = OTHER; note = 2'-O-methylguanosine-3'-phosphate
  modified_base 21: mod_base = OTHER; note = 2'-O-methyluridine-3'-phosphorothioate
  modified_base 22: mod_base = OTHER; note = 2'-O-methylguanosine-3'-phosphorothioate
  modified_base 23: mod_base = OTHER; note = 2'-O-methyluridine
acatgcactctctttcgaggtgt

SEQ ID NO: 304 - RNA, 23 nt, synthetic construct
  source 1..23: mol_type = other RNA
  modified_base 1: mod_base = OTHER; note = 2'-O-methyladenosine-3'-phosphorothioate
  modified_base 2: mod_base = OTHER; note = 2'-deoxy-2'-fluoroadenosine-3'-phosphorothioate
  modified_base 3: mod_base = OTHER; note = 2'-O-methylguanosine-3'-phosphate
  modified_base 4: mod_base = OTHER; note = 2'-O-methylcytidine-3'-phosphate
  modified_base 5: mod_base = OTHER; note = 2'-O-methyladenosine-3'-phosphate
  modified_base 6: mod_base = OTHER; note = 2'-deoxy-2'-fluoroguanosine-3'-phosphate
  modified_base 7: mod_base = OTHER; note = 2'-O-methylguanosine-3'-phosphate
  modified_base 8: mod_base = OTHER; note = 2'-deoxy-2'-fluorouridine-3'-phosphate
  modified_base 9: mod_base = OTHER; note = 2'-deoxy-2'-fluorocytidine-3'-phosphate
  modified_base 10: mod_base = OTHER; note = 2'-O-methyluridine-3'-phosphate
  modified_base 11: mod_base = OTHER; note = 2'-O-methylcytidine-3'-phosphate
  modified_base 12: mod_base = OTHER; note = 2'-O-methyluridine-3'-phosphate
  modified_base 13: mod_base = OTHER; note = 2'-O-methyluridine-3'-phosphate
  modified_base 14: mod_base = OTHER; note = 2'-deoxy-2'-fluorocytidine-3'-phosphate
  modified_base 15: mod_base = OTHER; note = 2'-O-methylcytidine-3'-phosphate
  modified_base 16: mod_base = OTHER; note = 2'-deoxy-2'-fluoroadenosine-3'-phosphate
  modified_base 17: mod_base = OTHER; note = 2'-O-methyluridine-3'-phosphate
  modified_base 18: mod_base = OTHER; note = 2'-O-methylguanosine-3'-phosphate
  modified_base 19: mod_base = OTHER; note = 2'-O-methylcytidine-3'-phosphate
  modified_base 20: mod_base = OTHER; note = 2'-O-methyladenosine-3'-phosphate
  modified_base 21: mod_base = OTHER; note = 2'-O-methylcytidine-3'-phosphorothioate
  modified_base 22: mod_base = OTHER; note = 2'-O-methyluridine-3'-phosphorothioate
  modified_base 23: mod_base = OTHER; note = 2'-O-methylcytidine
aagcaggtctcttccatgcactc

SEQ ID NO: 305 - RNA, 23 nt, synthetic construct
  source 1..23: mol_type = other RNA
  modified_base 1: mod_base = OTHER; note = 2'-O-methyladenosine-3'-phosphorothioate
  modified_base 2: mod_base = OTHER; note = 2'-deoxy-2'-fluorocytidine-3'-phosphorothioate
  modified_base 3: mod_base = OTHER; note = 2'-O-methylcytidine-3'-phosphate
  modified_base 4: mod_base = OTHER; note = 2'-O-methyluridine-3'-phosphate
  modified_base 5: mod_base = OTHER; note = 2'-O-methylcytidine-3'-phosphate
  modified_base 6: mod_base = OTHER; note = 2'-deoxy-2'-fluorouridine-3'-phosphate
  modified_base 7: mod_base = OTHER; note = 2'-O-methyluridine-3'-phosphate
  modified_base 8: mod_base = OTHER; note = 2'-deoxy-2'-fluorocytidine-3'-phosphate
  modified_base 9: mod_base = OTHER; note = 2'-deoxy-2'-fluoroguanosine-3'-phosphate
  modified_base 10: mod_base = OTHER; note = 2'-O-methyluridine-3'-phosphate
  modified_base 11: mod_base = OTHER; note = 2'-O-methyladenosine-3'-phosphate
  modified_base 12: mod_base = OTHER; note = 2'-O-methyluridine-3'-phosphate
  modified_base 13: mod_base = OTHER; note = 2'-O-methylguanosine-3'-phosphate
  modified_base 14: mod_base = OTHER; note = 2'-deoxy-2'-fluoroadenosine-3'-phosphate
  modified_base 15: mod_base = OTHER; note = 2'-O-methylguanosine-3'-phosphate
  modified_base 16: mod_base = OTHER; note = 2'-deoxy-2'-fluorocytidine-3'-phosphate
  modified_base 17: mod_base = OTHER; note = 2'-O-methyladenosine-3'-phosphate
  modified_base 18: mod_base = OTHER; note = 2'-O-methylguanosine-3'-phosphate
  modified_base 19: mod_base = OTHER; note = 2'-O-methylguanosine-3'-phosphate
  modified_base 20: mod_base = OTHER; note = 2'-O-methyluridine-3'-phosphate
  modified_base 21: mod_base = OTHER; note = 2'-O-methylcytidine-3'-phosphorothioate
  modified_base 22: mod_base = OTHER; note = 2'-O-methyluridine-3'-phosphorothioate
  modified_base 23: mod_base = OTHER; note = 2'-O-methylcytidine
acctcttcgtatgagcaggtctc

SEQ ID NO: 306 - RNA, 23 nt, synthetic construct
  source 1..23: mol_type = other RNA
  modified_base 1: mod_base = OTHER; note = 2'-O-methyladenosine-3'-phosphorothioate
  modified_base 2: mod_base = OTHER; note = 2'-deoxy-2'-fluoroadenosine-3'-phosphorothioate
  modified_base 3: mod_base = OTHER; note = 2'-O-methyladenosine-3'-phosphate
  modified_base 4: mod_base = OTHER; note = 2'-O-methylguanosine-3'-phosphate
  modified_base 5: mod_base = OTHER; note = 2'-O-methyladenosine-3'-phosphate
  modified_base 6: mod_base = OTHER; note = 2'-deoxy-2'-fluorocytidine-3'-phosphate
  modified_base 7: mod_base = OTHER; note = 2'-O-methylcytidine-3'-phosphate
  modified_base 8: mod_base = OTHER; note = 2'-deoxy-2'-fluorouridine-3'-phosphate
  modified_base 9: mod_base = OTHER; note = 2'-deoxy-2'-fluorocytidine-3'-phosphate
  modified_base 10: mod_base = OTHER; note = 2'-O-methylguanosine-3'-phosphate
  modified_base 11: mod_base = OTHER; note = 2'-O-methylcytidine-3'-phosphate
  modified_base 12: mod_base = OTHER; note = 2'-O-methylguanosine-3'-phosphate
  modified_base 13: mod_base = OTHER; note = 2'-O-methylguanosine-3'-phosphate
  modified_base 14: mod_base = OTHER; note = 2'-deoxy-2'-fluoroguanosine-3'-phosphate
  modified_base 15: mod_base = OTHER; note = 2'-O-methylcytidine-3'-phosphate
  modified_base 16: mod_base = OTHER; note = 2'-deoxy-2'-fluorocytidine-3'-phosphate
  modified_base 17: mod_base = OTHER; note = 2'-O-methyluridine-3'-phosphate
  modified_base 18: mod_base = OTHER; note = 2'-O-methylcytidine-3'-phosphate
  modified_base 19: mod_base = OTHER; note = 2'-O-methyluridine-3'-phosphate
  modified_base 20: mod_base = OTHER; note = 2'-O-methyluridine-3'-phosphate
  modified_base 21: mod_base = OTHER; note = 2'-O-methylcytidine-3'-phosphorothioate
  modified_base 22: mod_base = OTHER; note = 2'-O-methylguanosine-3'-phosphorothioate
  modified_base 23: mod_base = OTHER; note = 2'-O-methyluridine
aaagacctcgcgggcctcttcgt

SEQ ID NO: 307 - RNA, 23 nt, synthetic construct
  source 1..23: mol_type = other RNA
  modified_base 1: mod_base = OTHER; note = 2'-O-methyladenosine-3'-phosphorothioate
  modified_base 2: mod_base = OTHER; note = 2'-deoxy-2'-fluorocytidine-3'-phosphorothioate
  modified_base 3: mod_base = OTHER; note = 2'-O-methyluridine-3'-phosphate
  modified_base 4: mod_base = OTHER; note = 2'-O-methylguanosine-3'-phosphate
  modified_base 5: mod_base = OTHER; note = 2'-O-methyluridine-3'-phosphate
  modified_base 6: mod_base = OTHER; note = 2'-deoxy-2'-fluorocytidine-3'-phosphate
  modified_base 7: mod_base = OTHER; note = 2'-O-methylcytidine-3'-phosphate
  modified_base 8: mod_base = OTHER; note = 2'-deoxy-2'-fluorouridine-3'-phosphate
  modified_base 9: mod_base = OTHER; note = 2'-deoxy-2'-fluorocytidine-3'-phosphate
  modified_base 10: mod_base = OTHER; note = 2'-O-methyladenosine-3'-phosphate
  modified_base 11: mod_base = OTHER; note = 2'-O-methyladenosine-3'-phosphate
  modified_base 12: mod_base = OTHER; note = 2'-O-methyladenosine-3'-phosphate
  modified_base 13: mod_base = OTHER; note = 2'-O-methylguanosine-3'-phosphate
  modified_base 14: mod_base = OTHER; note = 2'-deoxy-2'-fluoroadenosine-3'-phosphate
  modified_base 15: mod_base = OTHER; note = 2'-O-methylcytidine-3'-phosphate
  modified_base 16: mod_base = OTHER; note = 2'-deoxy-2'-fluorocytidine-3'-phosphate
  modified_base 17: mod_base = OTHER; note = 2'-O-methyluridine-3'-phosphate
  modified_base 18: mod_base = OTHER; note = 2'-O-methylcytidine-3'-phosphate
  modified_base 19: mod_base = OTHER; note = 2'-O-methylguanosine-3'-phosphate
  modified_base 20: mod_base = OTHER; note = 2'-O-methylcytidine-3'-phosphate
  modified_base 21: mod_base = OTHER; note = 2'-O-methylguanosine-3'-phosphorothioate
  modified_base 22: mod_base = OTHER; note = 2'-O-methylguanosine-3'-phosphorothioate
  modified_base 23: mod_base = OTHER; note = 2'-O-methylguanosine
actgtcctcaaagacctcgcggg

SEQ ID NO: 308 - RNA, 23 nt, synthetic construct
  source 1..23: mol_type = other RNA
  modified_base 1: mod_base = OTHER; note = 2'-O-methyladenosine-3'-phosphorothioate
  modified_base 2: mod_base = OTHER; note = 2'-deoxy-2'-fluorouridine-3'-phosphorothioate
  modified_base 3: mod_base = OTHER; note = 2'-O-methylcytidine-3'-phosphate
  modified_base 4: mod_base = OTHER; note = 2'-O-methylguanosine-3'-phosphate
  modified_base 5: mod_base = OTHER; note = 2'-O-methyluridine-3'-phosphate
  modified_base 6: mod_base = OTHER; note = 2'-deoxy-2'-fluorocytidine-3'-phosphate
  modified_base 7: mod_base = OTHER; note = 2'-O-methyluridine-3'-phosphate
  modified_base 8: mod_base = OTHER; note = 2'-deoxy-2'-fluorouridine-3'-phosphate
  modified_base 9: mod_base = OTHER; note = 2'-deoxy-2'-fluoroguanosine-3'-phosphate
  modified_base 10: mod_base = OTHER; note = 2'-O-methyluridine-3'-phosphate
  modified_base 11: mod_base = OTHER; note = 2'-O-methylcytidine-3'-phosphate
  modified_base 12: mod_base = OTHER; note = 2'-O-methylguanosine-3'-phosphate
  modified_base 13: mod_base = OTHER; note = 2'-O-methylcytidine-3'-phosphate
  modified_base 14: mod_base = OTHER; note = 2'-deoxy-2'-fluorouridine-3'-phosphate
  modified_base 15: mod_base = OTHER; note = 2'-O-methylguanosine-3'-phosphate
  modified_base 16: mod_base = OTHER; note = 2'-deoxy-2'-fluorouridine-3'-phosphate
  modified_base 17: mod_base = OTHER; note = 2'-O-methylcytidine-3'-phosphate
  modified_base 18: mod_base = OTHER; note = 2'-O-methylcytidine-3'-phosphate
  modified_base 19: mod_base = OTHER; note = 2'-O-methyluridine-3'-phosphate
  modified_base 20: mod_base = OTHER; note = 2'-O-methylcytidine-3'-phosphate
  modified_base 21: mod_base = OTHER; note = 2'-O-methyladenosine-3'-phosphorothioate
  modified_base 22: mod_base = OTHER; note = 2'-O-methyladenosine-3'-phosphorothioate
  modified_base 23: mod_base = OTHER; note = 2'-O-methyladenosine
atcgtcttgtcgctgtcctcaaa

SEQ ID NO: 309 - RNA, 23 nt, synthetic construct
  source 1..23: mol_type = other RNA
  modified_base 1: mod_base = OTHER; note = 2'-O-methyladenosine-3'-phosphorothioate
  modified_base 2: mod_base = OTHER; note = 2'-deoxy-2'-fluoroadenosine-3'-phosphorothioate
  modified_base 3: mod_base = OTHER; note = 2'-O-methylguanosine-3'-phosphate
  modified_base 4: mod_base = OTHER; note = 2'-O-methyladenosine-3'-phosphate
  modified_base 5: mod_base = OTHER; note = 2'-O-methyladenosine-3'-phosphate
  modified_base 6: mod_base = OTHER; note = 2'-deoxy-2'-fluorouridine-3'-phosphate
  modified_base 7: mod_base = OTHER; note = 2'-O-methyluridine-3'-phosphate
  modified_base 8: mod_base = OTHER; note = 2'-deoxy-2'-fluorocytidine-3'-phosphate
  modified_base 9: mod_base = OTHER; note = 2'-deoxy-2'-fluoroadenosine-3'-phosphate
  modified_base 10: mod_base = OTHER; note = 2'-O-methyluridine-3'-phosphate
  modified_base 11: mod_base = OTHER; note = 2'-O-methyluridine-3'-phosphate
  modified_base 12: mod_base = OTHER; note = 2'-O-methylcytidine-3'-phosphate
  modified_base 13: mod_base = OTHER; note = 2'-O-methylguanosine-3'-phosphate
  modified_base 14: mod_base = OTHER; note = 2'-deoxy-2'-fluorouridine-3'-phosphate
  modified_base 15: mod_base = OTHER; note = 2'-O-methylcytidine-3'-phosphate
  modified_base 16: mod_base = OTHER; note = 2'-deoxy-2'-fluorouridine-3'-phosphate
  modified_base 17: mod_base = OTHER; note = 2'-O-methyluridine-3'-phosphate
  modified_base 18: mod_base = OTHER; note = 2'-O-methylguanosine-3'-phosphate
  modified_base 19: mod_base = OTHER; note = 2'-O-methyluridine-3'-phosphate
  modified_base 20: mod_base = OTHER; note = 2'-O-methylcytidine-3'-phosphate
  modified_base 21: mod_base = OTHER; note = 2'-O-methylguanosine-3'-phosphorothioate
  modified_base 22: mod_base = OTHER; note = 2'-O-methylcytidine-3'-phosphorothioate
  modified_base 23: mod_base = OTHER; note = 2'-O-methyluridine
aagaattcattcgtcttgtcgct

SEQ ID NO: 310 - RNA, 23 nt, synthetic construct
  source 1..23: mol_type = other RNA
  modified_base 1: mod_base = OTHER; note = 2'-O-methyladenosine-3'-phosphorothioate
  modified_base 2: mod_base = OTHER; note = 2'-deoxy-2'-fluoroadenosine-3'-phosphorothioate
  modified_base 3: mod_base = OTHER; note = 2'-O-methyluridine-3'-phosphate
  modified_base 4: mod_base = OTHER; note = 2'-O-methyluridine-3'-phosphate
  modified_base 5: mod_base = OTHER; note = 2'-O-methyluridine-3'-phosphate
  modified_base 6: mod_base = OTHER; note = 2'-deoxy-2'-fluoroadenosine-3'-phosphate
  modified_base 7: mod_base = OTHER; note = 2'-O-methyluridine-3'-phosphate
  modified_base 8: mod_base = OTHER; note = 2'-deoxy-2'-fluorouridine-3'-phosphate
  modified_base 9: mod_base = OTHER; note = 2'-deoxy-2'-fluorocytidine-3'-phosphate
  modified_base 10: mod_base = OTHER; note = 2'-O-methylcytidine-3'-phosphate
  modified_base 11: mod_base = OTHER; note = 2'-O-methyladenosine-3'-phosphate
  modified_base 12: mod_base = OTHER; note = 2'-O-methylguanosine-3'-phosphate
  modified_base 13: mod_base = OTHER; note = 2'-O-methyladenosine-3'-phosphate
  modified_base 14: mod_base = OTHER; note = 2'-deoxy-2'-fluoroadenosine-3'-phosphate
  modified_base 15: mod_base = OTHER; note = 2'-O-methyluridine-3'-phosphate
  modified_base 16: mod_base = OTHER; note = 2'-deoxy-2'-fluorouridine-3'-phosphate
  modified_base 17: mod_base = OTHER; note = 2'-O-methylcytidine-3'-phosphate
  modified_base 18: mod_base = OTHER; note = 2'-O-methyladenosine-3'-phosphate
  modified_base 19: mod_base = OTHER; note = 2'-O-methyluridine-3'-phosphate
  modified_base 20: mod_base = OTHER; note = 2'-O-methyluridine-3'-phosphate
  modified_base 21: mod_base = OTHER; note = 2'-O-methylcytidine-3'-phosphorothioate
  modified_base 22: mod_base = OTHER; note = 2'-O-methylguanosine-3'-phosphorothioate
  modified_base 23: mod_base = OTHER; note = 2'-O-methyluridine
aatttattccagaattcattcgt

SEQ ID NO: 311 - RNA, 23 nt, synthetic construct
  source 1..23: mol_type = other RNA
  modified_base 1: mod_base = OTHER; note = 2'-O-methyladenosine-3'-phosphorothioate
  modified_base 2: mod_base = OTHER; note = 2'-deoxy-2'-fluorocytidine-3'-phosphorothioate
  modified_base 3: mod_base = OTHER; note = 2'-O-methyladenosine-3'-phosphate
  modified_base 4: mod_base = OTHER; note = 2'-O-methyluridine-3'-phosphate
  modified_base 5: mod_base = OTHER; note = 2'-O-methylcytidine-3'-phosphate
  modified_base 6: mod_base = OTHER; note = 2'-deoxy-2'-fluorouridine-3'-phosphate
  modified_base 7: mod_base = OTHER; note = 2'-O-methyluridine-3'-phosphate
  modified_base 8: mod_base = OTHER; note = 2'-deoxy-2'-fluorouridine-3'-phosphate
  modified_base 9: mod_base = OTHER; note = 2'-deoxy-2'-fluoroguanosine-3'-phosphate
  modified_base 10: mod_base = OTHER; note = 2'-O-methyluridine-3'-phosphate
  modified_base 11: mod_base = OTHER; note = 2'-O-methyladenosine-3'-phosphate
  modified_base 12: mod_base = OTHER; note = 2'-O-methyluridine-3'-phosphate
  modified_base 13: mod_base = OTHER; note = 2'-O-methyluridine-3'-phosphate
  modified_base 14: mod_base = OTHER; note = 2'-deoxy-2'-fluorouridine-3'-phosphate
  modified_base 15: mod_base = OTHER; note = 2'-O-methyladenosine-3'-phosphate
  modified_base 16: mod_base = OTHER; note = 2'-deoxy-2'-fluorouridine-3'-phosphate
  modified_base 17: mod_base = OTHER; note = 2'-O-methyluridine-3'-phosphate
  modified_base 18: mod_base = OTHER; note = 2'-O-methylcytidine-3'-phosphate
  modified_base 19: mod_base = OTHER; note = 2'-O-methylcytidine-3'-phosphate
  modified_base 20: mod_base = OTHER; note = 2'-O-methyladenosine-3'-phosphate
  modified_base 21: mod_base = OTHER; note = 2'-O-methylguanosine-3'-phosphorothioate
  modified_base 22: mod_base = OTHER; note = 2'-O-methyladenosine-3'-phosphorothioate
  modified_base 23: mod_base = OTHER; note = 2'-O-methyladenosine
acatctttgtatttattccagaa

SEQ ID NO: 312 - RNA, 23 nt, synthetic construct
  source 1..23: mol_type = other RNA
  modified_base 1: mod_base = OTHER; note = 2'-O-methyladenosine-3'-phosphorothioate
  modified_base 2: mod_base = OTHER; note = 2'-deoxy-2'-fluoroadenosine-3'-phosphorothioate
  modified_base 3: mod_base = OTHER; note = 2'-O-methylcytidine-3'-phosphate
  modified_base 4: mod_base = OTHER; note = 2'-O-methyladenosine-3'-phosphate
  modified_base 5: mod_base = OTHER; note = 2'-O-methylcytidine-3'-phosphate
  modified_base 6: mod_base = OTHER; note = 2'-deoxy-2'-fluorouridine-3'-phosphate
  modified_base 7: mod_base = OTHER; note = 2'-O-methylguanosine-3'-phosphate
  modified_base 8: mod_base = OTHER; note = 2'-deoxy-2'-fluoroguanosine-3'-phosphate
  modified_base 9: mod_base = OTHER; note = 2'-deoxy-2'-fluorouridine-3'-phosphate
  modified_base 10: mod_base = OTHER; note = 2'-O-methylcytidine-3'-phosphate
  modified_base 11: mod_base = OTHER; note = 2'-O-methylguanosine-3'-phosphate
  modified_base 12: mod_base = OTHER; note = 2'-O-methylcytidine-3'-phosphate
  modified_base 13: mod_base = OTHER; note = 2'-O-methylcytidine-3'-phosphate
  modified_base 14: mod_base = OTHER; note = 2'-deoxy-2'-fluoroadenosine-3'-phosphate
  modified_base 15: mod_base = OTHER; note = 2'-O-methyluridine-3'-phosphate
  modified_base 16: mod_base = OTHER; note = 2'-deoxy-2'-fluorocytidine-3'-phosphate
  modified_base 17: mod_base = OTHER; note = 2'-O-methyluridine-3'-phosphate
  modified_base 18: mod_base = OTHER; note = 2'-O-methyluridine-3'-phosphate
  modified_base 19: mod_base = OTHER; note = 2'-O-methyluridine-3'-phosphate
  modified_base 20: mod_base = OTHER; note = 2'-O-methylguanosine-3'-phosphate
  modified_base 21: mod_base = OTHER; note = 2'-O-methyluridine-3'-phosphorothioate
  modified_base 22: mod_base = OTHER; note = 2'-O-methyladenosine-3'-phosphorothioate
  modified_base 23: mod_base = OTHER; note = 2'-O-methyluridine
aacactggtcgccatctttgtat

SEQ ID NO: 313 - RNA, 23 nt, synthetic construct
  source 1..23: mol_type = other RNA
  modified_base 1: mod_base = OTHER; note = 2'-O-methyladenosine-3'-phosphorothioate
  modified_base 2: mod_base = OTHER; note = 2'-deoxy-2'-fluoroguanosine-3'-phosphorothioate
  modified_base 3: mod_base = OTHER; note = 2'-O-methyladenosine-3'-phosphate
  modified_base 4: mod_base = OTHER; note = 2'-O-methylcytidine-3'-phosphate
  modified_base 5: mod_base = OTHER; note = 2'-O-methyluridine-3'-phosphate
  modified_base 6: mod_base = OTHER; note = 2'-deoxy-2'-fluoroguanosine-3'-phosphate
  modified_base 7: mod_base = OTHER; note = 2'-O-methylguanosine-3'-phosphate
  modified_base 8: mod_base = OTHER; note = 2'-deoxy-2'-fluorouridine-3'-phosphate
  modified_base 9: mod_base = OTHER; note = 2'-deoxy-2'-fluorocytidine-3'-phosphate
  modified_base 10: mod_base = OTHER; note = 2'-O-methyluridine-3'-phosphate
  modified_base 11: mod_base = OTHER; note = 2'-O-methylcytidine-3'-phosphate
  modified_base 12: mod_base = OTHER; note = 2'-O-methyladenosine-3'-phosphate
  modified_base 13: mod_base = OTHER; note = 2'-O-methylcytidine-3'-phosphate
  modified_base 14: mod_base = OTHER; note = 2'-deoxy-2'-fluoroadenosine-3'-phosphate
  modified_base 15: mod_base = OTHER; note = 2'-O-methylcytidine-3'-phosphate
  modified_base 16: mod_base = OTHER; note = 2'-deoxy-2'-fluorouridine-3'-phosphate
  modified_base 17: mod_base = OTHER; note = 2'-O-methylguanosine-3'-phosphate
  modified_base 18: mod_base = OTHER; note = 2'-O-methylguanosine-3'-phosphate
  modified_base 19: mod_base = OTHER; note = 2'-O-methyluridine-3'-phosphate
  modified_base 20: mod_base = OTHER; note = 2'-O-methylcytidine-3'-phosphate
  modified_base 21: mod_base = OTHER; note = 2'-O-methylguanosine-3'-phosphorothioate
  modified_base 22: mod_base = OTHER; note = 2'-O-methylcytidine-3'-phosphorothioate
  modified_base 23: mod_base = OTHER; note = 2'-O-methylcytidine
agactggtctcacactggtcgcc

SEQ ID NO: 314 - RNA, 23 nt, synthetic construct
  source 1..23: mol_type = other RNA
  modified_base 1: mod_base = OTHER; note = 2'-O-methyladenosine-3'-phosphorothioate
  modified_base 2: mod_base = OTHER; note = 2'-deoxy-2'-fluoroguanosine-3'-phosphorothioate
  modified_base 3: mod_base = OTHER; note = 2'-O-methyluridine-3'-phosphate
  modified_base 4: mod_base = OTHER; note = 2'-O-methyluridine-3'-phosphate
  modified_base 5: mod_base = OTHER; note = 2'-O-methylcytidine-3'-phosphate
  modified_base 6: mod_base = OTHER; note = 2'-deoxy-2'-fluorouridine-3'-phosphate
  modified_base 7: mod_base = OTHER; note = 2'-O-methylguanosine-3'-phosphate
  modified_base 8: mod_base = OTHER; note = 2'-deoxy-2'-fluoroguanosine-3'-phosphate
  modified_base 9: mod_base = OTHER; note = 2'-deoxy-2'-fluorocytidine-3'-phosphate
  modified_base 10: mod_base = OTHER; note = 2'-O-methyladenosine-3'-phosphate
  modified_base 11: mod_base = OTHER; note = 2'-O-methyladenosine-3'-phosphate
  modified_base 12: mod_base = OTHER; note = 2'-O-methylguanosine-3'-phosphate
  modified_base 13: mod_base = OTHER; note = 2'-O-methylguanosine-3'-phosphate
  modified_base 14: mod_base = OTHER; note = 2'-deoxy-2'-fluoroadenosine-3'-phosphate
  modified_base 15: mod_base = OTHER; note = 2'-O-methylcytidine-3'-phosphate
  modified_base 16: mod_base = OTHER; note = 2'-deoxy-2'-fluorouridine-3'-phosphate
  modified_base 17: mod_base = OTHER; note = 2'-O-methylguanosine-3'-phosphate
  modified_base 18: mod_base = OTHER; note = 2'-O-methylguanosine-3'-phosphate
  modified_base 19: mod_base = OTHER; note = 2'-O-methyluridine-3'-phosphate
  modified_base 20: mod_base = OTHER; note = 2'-O-methylcytidine-3'-phosphate
  modified_base 21: mod_base = OTHER; note = 2'-O-methyluridine-3'-phosphorothioate
  modified_base 22: mod_base = OTHER; note = 2'-O-methylcytidine-3'-phosphorothioate
  modified_base 23: mod_base = OTHER; note = 2'-O-methyladenosine
agttctggcaaggactggtctca

SEQ ID NO: 315 - RNA, 23 nt, synthetic construct
  source 1..23: mol_type = other RNA
  modified_base 1: mod_base = OTHER; note = 2'-O-methyladenosine-3'-phosphorothioate
  modified_base 2: mod_base = OTHER; note = 2'-deoxy-2'-fluoroadenosine-3'-phosphorothioate
  modified_base 3: mod_base = OTHER; note = 2'-O-methyluridine-3'-phosphate
  modified_base 4: mod_base = OTHER; note = 2'-O-methyluridine-3'-phosphate
  modified_base 5: mod_base = OTHER; note = 2'-O-methyluridine-3'-phosphate
  modified_base 6: mod_base = OTHER; note = 2'-deoxy-2'-fluoroguanosine-3'-phosphate
  modified_base 7: mod_base = OTHER; note = 2'-O-methylcytidine-3'-phosphate
  modified_base 8: mod_base = OTHER; note = 2'-deoxy-2'-fluorocytidine-3'-phosphate
  modified_base 9: mod_base = OTHER; note = 2'-deoxy-2'-fluorocytidine-3'-phosphate
  modified_base 10: mod_base = OTHER; note = 2'-O-methyluridine-3'-phosphate
  modified_base 11: mod_base = OTHER; note = 2'-O-methylguanosine-3'-phosphate
  modified_base 12: mod_base = OTHER; note = 2'-O-methylguanosine-3'-phosphate
  modified_base 13: mod_base = OTHER; note = 2'-O-methyluridine-3'-phosphate
  modified_base 14: mod_base = OTHER; note = 2'-deoxy-2'-fluorouridine-3'-phosphate
  modified_base 15: mod_base = OTHER; note = 2'-O-methylcytidine-3'-phosphate
  modified_base 16: mod_base = OTHER; note = 2'-deoxy-2'-fluorouridine-3'-phosphate
  modified_base 17: mod_base = OTHER; note = 2'-O-methylguanosine-3'-phosphate
  modified_base 18: mod_base = OTHER; note = 2'-O-methylguanosine-3'-phosphate
  modified_base 19: mod_base = OTHER; note = 2'-O-methylcytidine-3'-phosphate
  modified_base 20: mod_base = OTHER; note = 2'-O-methyladenosine-3'-phosphate
  modified_base 21: mod_base = OTHER; note = 2'-O-methyladenosine-3'-phosphorothioate
  modified_base 22: mod_base = OTHER; note = 2'-O-methylguanosine-3'-phosphorothioate
  modified_base 23: mod_base = OTHER; note = 2'-O-methylguanosine
aatttgccctggttctggcaagg

SEQ ID NO: 316 - RNA, 23 nt, synthetic construct
  source 1..23: mol_type = other RNA
  modified_base 1: mod_base = OTHER; note = 2'-O-methyladenosine-3'-phosphorothioate
  modified_base 2: mod_base = OTHER; note = 2'-deoxy-2'-fluorocytidine-3'-phosphorothioate
  modified_base 3: mod_base = OTHER; note = 2'-O-methylguanosine-3'-phosphate
  modified_base 4: mod_base = OTHER; note = 2'-O-methyluridine-3'-phosphate
  modified_base 5: mod_base = OTHER; note = 2'-O-methylcytidine-3'-phosphate
  modified_base 6: mod_base = OTHER; note = 2'-deoxy-2'-fluorouridine-3'-phosphate
  modified_base 7: mod_base = OTHER; note = 2'-O-methyluridine-3'-phosphate
  modified_base 8: mod_base = OTHER; note = 2'-deoxy-2'-fluorouridine-3'-phosphate
  modified_base 9: mod_base = OTHER; note = 2'-deoxy-2'-fluoroadenosine-3'-phosphate
  modified_base 10: mod_base = OTHER; note = 2'-O-methylcytidine-3'-phosphate
  modified_base 11: mod_base = OTHER; note = 2'-O-methyladenosine-3'-phosphate
  modified_base 12: mod_base = OTHER; note = 2'-O-methyluridine-3'-phosphate
  modified_base 13: mod_base = OTHER; note = 2'-O-methyluridine-3'-phosphate
  modified_base 14: mod_base = OTHER; note = 2'-deoxy-2'-fluorouridine-3'-phosphate
  modified_base 15: mod_base = OTHER; note = 2'-O-methylguanosine-3'-phosphate
  modified_base 16: mod_base = OTHER; note = 2'-deoxy-2'-fluorocytidine-3'-phosphate
  modified_base 17: mod_base = OTHER; note = 2'-O-methylcytidine-3'-phosphate
  modified_base 18: mod_base = OTHER; note = 2'-O-methylcytidine-3'-phosphate
  modified_base 19: mod_base = OTHER; note = 2'-O-methyluridine-3'-phosphate
  modified_base 20: mod_base = OTHER; note = 2'-O-methylguanosine-3'-phosphate
  modified_base 21: mod_base = OTHER; note = 2'-O-methylguanosine-3'-phosphorothioate
  modified_base 22: mod_base = OTHER; note = 2'-O-methyluridine-3'-phosphorothioate
  modified_base 23: mod_base = OTHER; note = 2'-O-methyluridine
acgtctttacatttgccctggtt

SEQ ID NO: 317 - RNA, 23 nt, synthetic construct
  source 1..23: mol_type = other RNA
  modified_base 1: mod_base = OTHER; note = 2'-O-methyladenosine-3'-phosphorothioate
  modified_base 2: mod_base = OTHER; note = 2'-deoxy-2'-fluorouridine-3'-phosphorothioate
  modified_base 3: mod_base = OTHER; note = 2'-O-methyluridine-3'-phosphate
  modified_base 4: mod_base = OTHER; note = 2'-O-methylcytidine-3'-phosphate
  modified_base 5: mod_base = OTHER; note = 2'-O-methyluridine-3'-phosphate
  modified_base 6: mod_base = OTHER; note = 2'-deoxy-2'-fluoroadenosine-3'-phosphate
  modified_base 7: mod_base = OTHER; note = 2'-O-methyladenosine-3'-phosphate
  modified_base 8: mod_base = OTHER; note = 2'-deoxy-2'-fluoroadenosine-3'-phosphate
  modified_base 9: mod_base = OTHER; note = 2'-deoxy-2'-fluorocytidine-3'-phosphate
  modified_base 10: mod_base = OTHER; note = 2'-O-methyladenosine-3'-phosphate
  modified_base 11: mod_base = OTHER; note = 2'-O-methylguanosine-3'-phosphate
  modified_base 12: mod_base = OTHER; note = 2'-O-methylguanosine-3'-phosphate
  modified_base 13: mod_base = OTHER; note = 2'-O-methyluridine-3'-phosphate
  modified_base 14: mod_base = OTHER; note = 2'-deoxy-2'-fluoroguanosine-3'-phosphate
  modified_base 15: mod_base = OTHER; note = 2'-O-methylcytidine-3'-phosphate
  modified_base 16: mod_base = OTHER; note = 2'-deoxy-2'-fluoroadenosine-3'-phosphate
  modified_base 17: mod_base = OTHER; note = 2'-O-methylguanosine-3'-phosphate
  modified_base 18: mod_base = OTHER; note = 2'-O-methylguanosine-3'-phosphate
  modified_base 19: mod_base = OTHER; note = 2'-O-methyluridine-3'-phosphate
  modified_base 20: mod_base = OTHER; note = 2'-O-methylguanosine-3'-phosphate
  modified_base 21: mod_base = OTHER; note = 2'-O-methyluridine-3'-phosphorothioate
  modified_base 22: mod_base = OTHER; note = 2'-O-methyladenosine-3'-phosphorothioate
  modified_base 23: mod_base = OTHER; note = 2'-O-methyluridine
attctaaacaggtgcaggtgtat

SEQ ID NO: 318 - RNA, 23 nt, synthetic construct
  source 1..23: mol_type = other RNA
  modified_base 1: mod_base = OTHER; note = 2'-O-methyladenosine-3'-phosphorothioate
  modified_base 2: mod_base = OTHER; note = 2'-deoxy-2'-fluorouridine-3'-phosphorothioate
  modified_base 3: mod_base = OTHER; note = 2'-O-methyluridine-3'-phosphate
  modified_base 4: mod_base = OTHER; note = 2'-O-methylcytidine-3'-phosphate
  modified_base 5: mod_base = OTHER; note = 2'-O-methylguanosine-3'-phosphate
  modified_base 6: mod_base = OTHER; note = 2'-deoxy-2'-fluoroadenosine-3'-phosphate
  modified_base 7: mod_base = OTHER; note = 2'-O-methyladenosine-3'-phosphate
  modified_base 8: mod_base = OTHER; note = 2'-deoxy-2'-fluorouridine-3'-phosphate
  modified_base 9: mod_base = OTHER; note = 2'-deoxy-2'-fluorocytidine-3'-phosphate
  modified_base 10: mod_base = OTHER; note = 2'-O-methylcytidine-3'-phosphate
  modified_base 11: mod_base = OTHER; note = 2'-O-methyluridine-3'-phosphate
  modified_base 12: mod_base = OTHER; note = 2'-O-methyluridine-3'-phosphate
  modified_base 13: mod_base = OTHER; note = 2'-O-methylcytidine-3'-phosphate
  modified_base 14: mod_base = OTHER; note = 2'-deoxy-2'-fluorouridine-3'-phosphate
  modified_base 15: mod_base = OTHER; note = 2'-O-methyladenosine-3'-phosphate
  modified_base 16: mod_base = OTHER; note = 2'-deoxy-2'-fluoroadenosine-3'-phosphate
  modified_base 17: mod_base = OTHER; note = 2'-O-methyladenosine-3'-phosphate
  modified_base 18: mod_base = OTHER; note = 2'-O-methylcytidine-3'-phosphate
  modified_base 19: mod_base = OTHER; note = 2'-O-methyladenosine-3'-phosphate
  modified_base 20: mod_base = OTHER; note = 2'-O-methylguanosine-3'-phosphate
  modified_base 21: mod_base = OTHER; note = 2'-O-methylguanosine-3'-phosphorothioate
  modified_base 22: mod_base = OTHER; note = 2'-O-methyluridine-3'-phosphorothioate
  modified_base 23: mod_base = OTHER; note = 2'-O-methylguanosine
attcgaatccttctaaacaggtg

SEQ ID NO: 319 - RNA, 23 nt, synthetic construct
  source 1..23: mol_type = other RNA
  modified_base 1: mod_base = OTHER; note = 2'-O-methyladenosine-3'-phosphorothioate
  modified_base 2: mod_base = OTHER; note = 2'-deoxy-2'-fluorocytidine-3'-phosphorothioate
  modified_base 3: mod_base = OTHER; note = 2'-O-methylguanosine-3'-phosphate
  modified_base 4: mod_base = OTHER; note = 2'-O-methyluridine-3'-phosphate
  modified_base 5: mod_base = OTHER; note = 2'-O-methylguanosine-3'-phosphate
  modified_base 6: mod_base = OTHER; note = 2'-deoxy-2'-fluorouridine-3'-phosphate
  modified_base 7: mod_base = OTHER; note = 2'-O-methylguanosine-3'-phosphate
  modified_base 8: mod_base = OTHER; note = 2'-deoxy-2'-fluoroadenosine-3'-phosphate
  modified_base 9: mod_base = OTHER; note = 2'-deoxy-2'-fluoroadenosine-3'-phosphate
  modified_base 10: mod_base = OTHER; note = 2'-O-methyluridine-3'-phosphate
  modified_base 11: mod_base = OTHER; note = 2'-O-methyladenosine-3'-phosphate
  modified_base 12: mod_base = OTHER; note = 2'-O-methyladenosine-3'-phosphate
  modified_base 13: mod_base = OTHER; note = 2'-O-methyluridine-3'-phosphate
  modified_base 14: mod_base = OTHER; note = 2'-deoxy-2'-fluorouridine-3'-phosphate
  modified_base 15: mod_base = OTHER; note = 2'-O-methylcytidine-3'-phosphate
  modified_base 16: mod_base = OTHER; note = 2'-deoxy-2'-fluoroadenosine-3'-phosphate
  modified_base 17: mod_base = OTHER; note = 2'-O-methylcytidine-3'-phosphate
  modified_base 18: mod_base = OTHER; note = 2'-O-methyladenosine-3'-phosphate
  modified_base 19: mod_base = OTHER; note = 2'-O-methylguanosine-3'-phosphate
  modified_base 20: mod_base = OTHER; note = 2'-O-methyluridine-3'-phosphate
  modified_base 21: mod_base = OTHER; note = 2'-O-methyluridine-3'-phosphorothioate
  modified_base 22: mod_base = OTHER; note = 2'-O-methyluridine-3'-phosphorothioate
  modified_base 23: mod_base = OTHER; note = 2'-O-methyluridine
acgtgtgaataattcacagtttt

SEQ ID NO: 320 - RNA, 23 nt, synthetic construct
  source 1..23: mol_type = other RNA
  modified_base 1: mod_base = OTHER; note = 2'-O-methyladenosine-3'-phosphorothioate
  modified_base 2: mod_base = OTHER; note = 2'-deoxy-2'-fluorocytidine-3'-phosphorothioate
  modified_base 3: mod_base = OTHER; note = 2'-O-methyladenosine-3'-phosphate
  modified_base 4: mod_base = OTHER; note = 2'-O-methylguanosine-3'-phosphate
  modified_base 5: mod_base = OTHER; note = 2'-O-methyladenosine-3'-phosphate
  modified_base 6: mod_base = OTHER; note = 2'-deoxy-2'-fluoroguanosine-3'-phosphate
  modified_base 7: mod_base = OTHER; note = 2'-O-methylcytidine-3'-phosphate
  modified_base 8: mod_base = OTHER; note = 2'-deoxy-2'-fluorouridine-3'-phosphate
  modified_base 9: mod_base = OTHER; note = 2'-deoxy-2'-fluorouridine-3'-phosphate
  modified_base 10: mod_base = OTHER; note = 2'-O-methylcytidine-3'-phosphate
  modified_base 11: mod_base = OTHER; note = 2'-O-methylcytidine-3'-phosphate
  modified_base 12: mod_base = OTHER; note = 2'-O-methylguanosine-3'-phosphate
  modified_base 13: mod_base = OTHER; note = 2'-O-methyluridine-3'-phosphate
  modified_base 14: mod_base = OTHER; note = 2'-deoxy-2'-fluoroguanosine-3'-phosphate
  modified_base 15: mod_base = OTHER; note = 2'-O-methyluridine-3'-phosphate
  modified_base 16: mod_base = OTHER; note = 2'-deoxy-2'-fluoroguanosine-3'-phosphate
  modified_base 17: mod_base = OTHER; note = 2'-O-methyladenosine-3'-phosphate
  modified_base 18: mod_base = OTHER; note = 2'-O-methyladenosine-3'-phosphate
  modified_base 19: mod_base = OTHER; note = 2'-O-methyluridine-3'-phosphate
  modified_base 20: mod_base = OTHER; note = 2'-O-methyladenosine-3'-phosphate
  modified_base 21: mod_base = OTHER; note = 2'-O-methyladenosine-3'-phosphorothioate
  modified_base 22: mod_base = OTHER; note = 2'-O-methyluridine-3'-phosphorothioate
  modified_base 23: mod_base = OTHER; note = 2'-O-methyluridine
acagagcttccgtgtgaataatt

SEQ ID NO: 321 - RNA, 23 nt, synthetic construct
  source 1..23: mol_type = other RNA
  modified_base 1: mod_base = OTHER; note = 2'-O-methyladenosine-3'-phosphorothioate
  modified_base 2: mod_base = OTHER; note = 2'-deoxy-2'-fluorocytidine-3'-phosphorothioate
  modified_base 3: mod_base = OTHER; note = 2'-O-methylcytidine-3'-phosphate
  modified_base 4: mod_base = OTHER; note = 2'-O-methylguanosine-3'-phosphate
  modified_base 5: mod_base = OTHER; note = 2'-O-methyluridine-3'-phosphate
  modified_base 6: mod_base = OTHER; note = 2'-deoxy-2'-fluorouridine-3'-phosphate
  modified_base 7: mod_base = OTHER; note = 2'-O-methylguanosine-3'-phosphate
  modified_base 8: mod_base = OTHER; note = 2'-deoxy-2'-fluorouridine-3'-phosphate
  modified_base 9: mod_base = OTHER; note = 2'-deoxy-2'-fluorocytidine-3'-phosphate
  modified_base 10: mod_base = OTHER; note = 2'-O-methylcytidine-3'-phosphate
  modified_base 11: mod_base = OTHER; note = 2'-O-methyladenosine-3'-phosphate
  modified_base 12: mod_base = OTHER; note = 2'-O-methylguanosine-3'-phosphate
  modified_base 13: mod_base = OTHER; note = 2'-O-methylguanosine-3'-phosphate
  modified_base 14: mod_base = OTHER; note = 2'-deoxy-2'-fluorocytidine-3'-phosphate
  modified_base 15: mod_base = OTHER; note = 2'-O-methyluridine-3'-phosphate
  modified_base 16: mod_base = OTHER; note = 2'-deoxy-2'-fluoroguanosine-3'-phosphate
  modified_base 17: mod_base = OTHER; note = 2'-O-methylcytidine-3'-phosphate
  modified_base 18: mod_base = OTHER; note = 2'-O-methyladenosine-3'-phosphate
  modified_base 19: mod_base = OTHER; note = 2'-O-methylguanosine-3'-phosphate
  modified_base 20: mod_base = OTHER; note = 2'-O-methyladenosine-3'-phosphate
  modified_base 21: mod_base = OTHER; note = 2'-O-methylguanosine-3'-phosphorothioate
  modified_base 22: mod_base = OTHER; note = 2'-O-methylcytidine-3'-phosphorothioate
  modified_base 23: mod_base = OTHER; note = 2'-O-methyluridine
accgttgtccaggctgcagagct

SEQ ID NO: 322 - RNA, 23 nt, synthetic construct
  source 1..23: mol_type = other RNA
  modified_base 1: mod_base = OTHER; note = 2'-O-methyladenosine-3'-phosphorothioate
  modified_base 2: mod_base = OTHER; note = 2'-deoxy-2'-fluorouridine-3'-phosphorothioate
  modified_base 3: mod_base = OTHER; note = 2'-O-methylcytidine-3'-phosphate
  modified_base 4: mod_base = OTHER; note = 2'-O-methylguanosine-3'-phosphate
  modified_base 5: mod_base = OTHER; note = 2'-O-methyluridine-3'-phosphate
  modified_base 6: mod_base = OTHER; note = 2'-deoxy-2'-fluoroguanosine-3'-phosphate
  modified_base 7: mod_base = OTHER; note = 2'-O-methylguanosine-3'-phosphate
  modified_base 8: mod_base = OTHER; note = 2'-deoxy-2'-fluorocytidine-3'-phosphate
  modified_base 9: mod_base = OTHER; note = 2'-deoxy-2'-fluoroadenosine-3'-phosphate
  modified_base 10: mod_base = OTHER; note = 2'-O-methylguanosine-3'-phosphate
  modified_base 11: mod_base = OTHER; note = 2'-O-methyladenosine-3'-phosphate
  modified_base 12: mod_base = OTHER; note = 2'-O-methyladenosine-3'-phosphate
  modified_base 13: mod_base = OTHER; note = 2'-O-methylcytidine-3'-phosphate
  modified_base 14: mod_base = OTHER; note = 2'-deoxy-2'-fluorouridine-3'-phosphate
  modified_base 15: mod_base = OTHER; note = 2'-O-methylguanosine-3'-phosphate
  modified_base 16: mod_base = OTHER; note = 2'-deoxy-2'-fluoroguanosine-3'-phosphate
  modified_base 17: mod_base = OTHER; note = 2'-O-methyluridine-3'-phosphate
  modified_base 18: mod_base = OTHER; note = 2'-O-methylcytidine-3'-phosphate
  modified_base 19: mod_base = OTHER; note = 2'-O-methyladenosine-3'-phosphate
  modified_base 20: mod_base = OTHER; note = 2'-O-methylcytidine-3'-phosphate
  modified_base 21: mod_base = OTHER; note = 2'-O-methyladenosine-3'-phosphorothioate
  modified_base 22: mod_base = OTHER; note = 2'-O-methylguanosine-3'-phosphorothioate
  modified_base 23: mod_base = OTHER; note = 2'-O-methyluridine
atcgtggcagaactggtcacagt

SEQ ID NO: 323 - RNA, 23 nt, synthetic construct
  source 1..23: mol_type = other RNA
  modified_base 1: mod_base = OTHER; note = 2'-O-methyladenosine-3'-phosphorothioate
  modified_base 2: mod_base = OTHER; note = 2'-deoxy-2'-fluoroadenosine-3'-phosphorothioate
  modified_base 3: mod_base = OTHER; note = 2'-O-methylcytidine-3'-phosphate
  modified_base 4: mod_base = OTHER; note = 2'-O-methyladenosine-3'-phosphate
  modified_base 5: mod_base = OTHER; note = 2'-O-methylguanosine-3'-phosphate
  modified_base 6: mod_base = OTHER; note = 2'-deoxy-2'-fluoroadenosine-3'-phosphate
  modified_base 7: mod_base = OTHER; note = 2'-O-methylguanosine-3'-phosphate
  modified_base 8: mod_base = OTHER; note = 2'-deoxy-2'-fluorouridine-3'-phosphate
  modified_base 9: mod_base = OTHER; note = 2'-deoxy-2'-fluorouridine-3'-phosphate
  modified_base 10: mod_base = OTHER; note = 2'-O-methylcytidine-3'-phosphate
  modified_base 11: mod_base = OTHER; note = 2'-O-methyluridine-3'-phosphate
  modified_base 12: mod_base = OTHER; note = 2'-O-methylguanosine-3'-phosphate
  modified_base 13: mod_base = OTHER; note = 2'-O-methyluridine-3'-phosphate
  modified_base 14: mod_base = OTHER; note = 2'-deoxy-2'-fluorouridine-3'-phosphate
  modified_base 15: mod_base = OTHER; note = 2'-O-methylcytidine-3'-phosphate
  modified_base 16: mod_base = OTHER; note = 2'-deoxy-2'-fluorocytidine-3'-phosphate
  modified_base 17: mod_base = OTHER; note = 2'-O-methyluridine-3'-phosphate
  modified_base 18: mod_base = OTHER; note = 2'-O-methylcytidine-3'-phosphate
  modified_base 19: mod_base = OTHER; note = 2'-O-methylguanosine-3'-phosphate
  modified_base 20: mod_base = OTHER; note = 2'-O-methyluridine-3'-phosphate
  modified_base 21: mod_base = OTHER; note = 2'-O-methylguanosine-3'-phosphorothioate
  modified_base 22: mod_base = OTHER; note = 2'-O-methylguanosine-3'-phosphorothioate
  modified_base 23: mod_base = OTHER; note = 2'-O-methylcytidine
aacagagttctgttcctcgtggc

SEQ ID NO: 324 - RNA, 23 nt, synthetic construct
  source 1..23: mol_type = other RNA
  modified_base 1: mod_base = OTHER; note = 2'-O-methyladenosine-3'-phosphorothioate
  modified_base 2: mod_base = OTHER; note = 2'-deoxy-2'-fluoroadenosine-3'-phosphorothioate
  modified_base 3: mod_base = OTHER; note = 2'-O-methylguanosine-3'-phosphate
  modified_base 4: mod_base = OTHER; note = 2'-O-methylguanosine-3'-phosphate
  modified_base 5: mod_base = OTHER; note = 2'-O-methyladenosine-3'-phosphate
  modified_base 6: mod_base = OTHER; note = 2'-deoxy-2'-fluoroguanosine-3'-phosphate
  modified_base 7: mod_base = OTHER; note = 2'-O-methylcytidine-3'-phosphate
  modified_base 8: mod_base = OTHER; note = 2'-deoxy-2'-fluoroadenosine-3'-phosphate
  modified_base 9: mod_base = OTHER; note = 2'-deoxy-2'-fluorocytidine-3'-phosphate
  modified_base 10: mod_base = OTHER; note = 2'-O-methyladenosine-3'-phosphate
  modified_base 11: mod_base = OTHER; note = 2'-O-methylcytidine-3'-phosphate
  modified_base 12: mod_base = OTHER; note = 2'-O-methylcytidine-3'-phosphate
  modified_base 13: mod_base = OTHER; note = 2'-O-methyladenosine-3'-phosphate
  modified_base 14: mod_base = OTHER; note = 2'-deoxy-2'-fluorocytidine-3'-phosphate
  modified_base 15: mod_base = OTHER; note = 2'-O-methyladenosine-3'-phosphate
  modified_base 16: mod_base = OTHER; note = 2'-deoxy-2'-fluoroguanosine-3'-phosphate
  modified_base 17: mod_base = OTHER; note = 2'-O-methyladenosine-3'-phosphate
  modified_base 18: mod_base = OTHER; note = 2'-O-methylguanosine-3'-phosphate
  modified_base 19: mod_base = OTHER; note = 2'-O-methyluridine-3'-phosphate
  modified_base 20: mod_base = OTHER; note = 2'-O-methyluridine-3'-phosphate
  modified_base 21: mod_base = OTHER; note = 2'-O-methylcytidine-3'-phosphorothioate
  modified_base 22: mod_base = OTHER; note = 2'-O-methyluridine-3'-phosphorothioate
  modified_base 23: mod_base = OTHER; note = 2'-O-methylguanosine
aaggagcacaccacagagttctg

SEQ ID NO: 325 - RNA, 23 nt, synthetic construct
  source 1..23: mol_type = other RNA
  modified_base 1: mod_base = OTHER; note = 2'-O-methyladenosine-3'-phosphorothioate
  modified_base 2: mod_base = OTHER; note = 2'-deoxy-2'-fluorocytidine-3'-phosphorothioate
  modified_base 3: mod_base = OTHER; note = 2'-O-methylcytidine-3'-phosphate
  modified_base 4: mod_base = OTHER; note = 2'-O-methyluridine-3'-phosphate
  modified_base 5: mod_base = OTHER; note = 2'-O-methyluridine-3'-phosphate
  modified_base 6: mod_base = OTHER; note = 2'-deoxy-2'-fluoroguanosine-3'-phosphate
  modified_base 7: mod_base = OTHER; note = 2'-O-methylcytidine-3'-phosphate
  modified_base 8: mod_base = OTHER; note = 2'-deoxy-2'-fluorocytidine-3'-phosphate
  modified_base 9: mod_base = OTHER; note = 2'-deoxy-2'-fluoroguanosine-3'-phosphate
  modified_base 10: mod_base = OTHER; note = 2'-O-methyluridine-3'-phosphate
  modified_base 11: mod_base = OTHER; note = 2'-O-methyluridine-3'-phosphate
  modified_base 12: mod_base = OTHER; note = 2'-O-methylguanosine-3'-phosphate
  modified_base 13: mod_base = OTHER; note = 2'-O-methyluridine-3'-phosphate
  modified_base 14: mod_base = OTHER; note = 2'-deoxy-2'-fluorocytidine-3'-phosphate
  modified_base 15: mod_base = OTHER; note = 2'-O-methyladenosine-3'-phosphate
  modified_base 16: mod_base = OTHER; note = 2'-deoxy-2'-fluoroguanosine-3'-phosphate
  modified_base 17: mod_base = OTHER; note = 2'-O-methylcytidine-3'-phosphate
  modified_base 18: mod_base = OTHER; note = 2'-O-methylcytidine-3'-phosphate
  modified_base 19: mod_base = OTHER; note = 2'-O-methyladenosine-3'-phosphate
  modified_base 20: mod_base = OTHER; note = 2'-O-methylguanosine-3'-phosphate
  modified_base 21: mod_base = OTHER; note = 2'-O-methylguanosine-3'-phosphorothioate
  modified_base 22: mod_base = OTHER; note = 2'-O-methylguanosine-3'-phosphorothioate
  modified_base 23: mod_base = OTHER; note = 2'-O-methyluridine
accttgccgttgtcagccagggt

SEQ ID NO: 326 - RNA, 23 nt, synthetic construct
  source 1..23: mol_type = other RNA
  modified_base 1: mod_base = OTHER; note = 2'-O-methyladenosine-3'-phosphorothioate
  modified_base 2: mod_base = OTHER; note = 2'-deoxy-2'-fluorocytidine-3'-phosphorothioate
  modified_base 3: mod_base = OTHER; note = 2'-O-methylcytidine-3'-phosphate
  modified_base 4: mod_base = OTHER; note = 2'-O-methylcytidine-3'-phosphate
  modified_base 5: mod_base = OTHER; note = 2'-O-methyluridine-3'-phosphate
  modified_base 6: mod_base = OTHER; note = 2'-deoxy-2'-fluoroguanosine-3'-phosphate
  modified_base 7: mod_base = OTHER; note = 2'-O-methyluridine-3'-phosphate
  modified_base 8: mod_base = OTHER; note = 2'-deoxy-2'-fluoroguanosine-3'-phosphate
  modified_base 9: mod_base = OTHER; note = 2'-deoxy-2'-fluoroguanosine-3'-phosphate
  modified_base 10: mod_base = OTHER; note = 2'-O-methylguanosine-3'-phosphate
  modified_base 11: mod_base = OTHER; note = 2'-O-methyladenosine-3'-phosphate
  modified_base 12: mod_base = OTHER; note = 2'-O-methyladenosine-3'-phosphate
  modified_base 13: mod_base = OTHER; note = 2'-O-methyluridine-3'-phosphate
  modified_base 14: mod_base = OTHER; note = 2'-deoxy-2'-fluoroguanosine-3'-phosphate
  modified_base 15: mod_base = OTHER; note = 2'-O-methylcytidine-3'-phosphate
  modified_base 16: mod_base = OTHER; note = 2'-deoxy-2'-fluoroadenosine-3'-phosphate
  modified_base 17: mod_base = OTHER; note = 2'-O-methylguanosine-3'-phosphate
  modified_base 18: mod_base = OTHER; note = 2'-O-methylguanosine-3'-phosphate
  modified_base 19: mod_base = OTHER; note = 2'-O-methylcytidine-3'-phosphate
  modified_base 20: mod_base = OTHER; note = 2'-O-methylcytidine-3'-phosphate
  modified_base 21: mod_base = OTHER; note = 2'-O-methyluridine-3'-phosphorothioate
  modified_base 22: mod_base = OTHER; note = 2'-O-methyluridine-3'-phosphorothioate
  modified_base 23: mod_base = OTHER; note = 2'-O-methylguanosine
accctgtgggaatgcaggccttg

SEQ ID NO: 327 - RNA, 23 nt, synthetic construct
  source 1..23: mol_type = other RNA
  modified_base 1: mod_base = OTHER; note = 2'-O-methyladenosine-3'-phosphorothioate
  modified_base 2: mod_base = OTHER; note = 2'-deoxy-2'-fluorouridine-3'-phosphorothioate
  modified_base 3: mod_base = OTHER; note = 2'-O-methylcytidine-3'-phosphate
  modified_base 4: mod_base = OTHER; note = 2'-O-methylcytidine-3'-phosphate
  modified_base 5: mod_base = OTHER; note = 2'-O-methyladenosine-3'-phosphate
  modified_base 6: mod_base = OTHER; note = 2'-deoxy-2'-fluoroguanosine-3'-phosphate
  modified_base 7: mod_base = OTHER; note = 2'-O-methylguanosine-3'-phosphate
  modified_base 8: mod_base = OTHER; note = 2'-deoxy-2'-fluoroguanosine-3'-phosphate
  modified_base 9: mod_base = OTHER; note = 2'-deoxy-2'-fluorouridine-3'-phosphate
  modified_base 10: mod_base = OTHER; note = 2'-O-methylcytidine-3'-phosphate
  modified_base 11: mod_base = OTHER; note = 2'-O-methyluridine-3'-phosphate
  modified_base 12: mod_base = OTHER; note = 2'-O-methylguanosine-3'-phosphate
  modified_base 13: mod_base = OTHER; note = 2'-O-methyluridine-3'-phosphate
  modified_base 14: mod_base = OTHER; note = 2'-deoxy-2'-fluorouridine-3'-phosphate
  modified_base 15: mod_base = OTHER; note = 2'-O-methyluridine-3'-phosphate
  modified_base 16: mod_base = OTHER; note = 2'-deoxy-2'-fluorocytidine-3'-phosphate
  modified_base 17: mod_base = OTHER; note = 2'-O-methylcytidine-3'-phosphate
  modified_base 18: mod_base = OTHER; note = 2'-O-methylcytidine-3'-phosphate
  modified_base 19: mod_base = OTHER; note = 2'-O-methyladenosine-3'-phosphate
  modified_base 20: mod_base = OTHER; note = 2'-O-methylcytidine-3'-phosphate
  modified_base 21: mod_base = OTHER; note = 2'-O-methyladenosine-3'-phosphorothioate
  modified_base 22: mod_base = OTHER; note = 2'-O-methylguanosine-3'-phosphorothioate
  modified_base 23: mod_base = OTHER; note = 2'-O-methylguanosine
atccagggtctgtttcccacagg

SEQ ID NO: 328 - RNA, 23 nt, synthetic construct
  source 1..23: mol_type = other RNA
  modified_base 1: mod_base = OTHER; note = 2'-O-methyladenosine-3'-phosphorothioate
  modified_base 2: mod_base = OTHER; note = 2'-deoxy-2'-fluorocytidine-3'-phosphorothioate
  modified_base 3: mod_base = OTHER; note = 2'-O-methyluridine-3'-phosphate
  modified_base 4: mod_base = OTHER; note = 2'-O-methyluridine-3'-phosphate
  modified_base 5: mod_base = OTHER; note = 2'-O-methylcytidine-3'-phosphate
  modified_base 6: mod_base = OTHER; note = 2'-deoxy-2'-fluorocytidine-3'-phosphate
  modified_base 7: mod_base = OTHER; note = 2'-O-methyluridine-3'-phosphate
  modified_base 8: mod_base = OTHER; note = 2'-deoxy-2'-fluoroguanosine-3'-phosphate
  modified_base 9: mod_base = OTHER; note = 2'-deoxy-2'-fluorocytidine-3'-phosphate
  modified_base 10: mod_base = OTHER; note = 2'-O-methylguanosine-3'-phosphate
  modified_base 11: mod_base = OTHER; note = 2'-O-methyluridine-3'-phosphate
  modified_base 12: mod_base = OTHER; note = 2'-O-methyluridine-3'-phosphate
  modified_base 13: mod_base = OTHER; note = 2'-O-methylcytidine-3'-phosphate
  modified_base 14: mod_base = OTHER; note = 2'-deoxy-2'-fluorocytidine-3'-phosphate
  modified_base 15: mod_base = OTHER; note = 2'-O-methyladenosine-3'-phosphate
  modified_base 16: mod_base = OTHER; note = 2'-deoxy-2'-fluoroguanosine-3'-phosphate
  modified_base 17: mod_base = OTHER; note = 2'-O-methylguanosine-3'-phosphate
  modified_base 18: mod_base = OTHER; note = 2'-O-methylguanosine-3'-phosphate
  modified_base 19: mod_base = OTHER; note = 2'-O-methyluridine-3'-phosphate
  modified_base 20: mod_base = OTHER; note = 2'-O-methylcytidine-3'-phosphate
  modified_base 21: mod_base = OTHER; note = 2'-O-methyluridine-3'-phosphorothioate
  modified_base 22: mod_base = OTHER; note = 2'-O-methylguanosine-3'-phosphorothioate
  modified_base 23: mod_base = OTHER; note = 2'-O-methyluridine
acttcctgcgttccagggtctgt

SEQ ID NO: 329 - RNA, 23 nt, synthetic construct
  source 1..23: mol_type = other RNA
  modified_base 1: mod_base = OTHER; note = 2'-O-methyladenosine-3'-phosphorothioate
  modified_base 2: mod_base = OTHER; note = 2'-deoxy-2'-fluorocytidine-3'-phosphorothioate
  modified_base 3: mod_base = OTHER; note = 2'-O-methyladenosine-3'-phosphate
  modified_base 4: mod_base = OTHER; note = 2'-O-methylcytidine-3'-phosphate
  modified_base 5: mod_base = OTHER; note = 2'-O-methyluridine-3'-phosphate
  modified_base 6: mod_base = OTHER; note = 2'-deoxy-2'-fluoroguanosine-3'-phosphate
  modified_base 7: mod_base = OTHER; note = 2'-O-methyladenosine-3'-phosphate
  modified_base 8: mod_base = OTHER; note = 2'-deoxy-2'-fluorocytidine-3'-phosphate
  modified_base 9: mod_base = OTHER; note = 2'-deoxy-2'-fluorocytidine-3'-phosphate
  modified_base 10: mod_base = OTHER; note = 2'-O-methyluridine-3'-phosphate
  modified_base 11: mod_base = OTHER; note = 2'-O-methylcytidine-3'-phosphate
  modified_base 12: mod_base = OTHER; note = 2'-O-methyluridine-3'-phosphate
  modified_base 13: mod_base = OTHER; note = 2'-O-methyluridine-3'-phosphate
  modified_base 14: mod_base = OTHER; note = 2'-deoxy-2'-fluorocytidine-3'-phosphate
  modified_base 15: mod_base = OTHER; note = 2'-O-methylcytidine-3'-phosphate
  modified_base 16: mod_base = OTHER; note = 2'-deoxy-2'-fluorouridine-3'-phosphate
  modified_base 17: mod_base = OTHER; note = 2'-O-methylguanosine-3'-phosphate
  modified_base 18: mod_base = OTHER; note = 2'-O-methylcytidine-3'-phosphate
  modified_base 19: mod_base = OTHER; note = 2'-O-methylguanosine-3'-phosphate
  modified_base 20: mod_base = OTHER; note = 2'-O-methyluridine-3'-phosphate
  modified_base 21: mod_base = OTHER; note = 2'-O-methyluridine-3'-phosphorothioate
  modified_base 22: mod_base = OTHER; note = 2'-O-methylcytidine-3'-phosphorothioate
  modified_base 23: mod_base = OTHER; note = 2'-O-methylcytidine
acactgacctcttcctgcgttcc

SEQ ID NO: 330 - RNA, 23 nt, synthetic construct
  source 1..23: mol_type = other RNA
  modified_base 1: mod_base = OTHER; note = 2'-O-methyladenosine-3'-phosphorothioate
  modified_base 2: mod_base = OTHER; note = 2'-deoxy-2'-fluorocytidine-3'-phosphorothioate
  modified_base 3: mod_base = OTHER; note = 2'-O-methyluridine-3'-phosphate
  modified_base 4: mod_base = OTHER; note = 2'-O-methyluridine-3'-phosphate
  modified_base 5: mod_base = OTHER; note = 2'-O-methylcytidine-3'-phosphate
  modified_base 6: mod_base = OTHER; note = 2'-deoxy-2'-fluorocytidine-3'-phosphate
  modified_base 7: mod_base = OTHER; note = 2'-O-methyladenosine-3'-phosphate
  modified_base 8: mod_base = OTHER; note = 2'-deoxy-2'-fluorouridine-3'-phosphate
  modified_base 9: mod_base = OTHER; note = 2'-deoxy-2'-fluoroguanosine-3'-phosphate
  modified_base 10: mod_base = OTHER; note = 2'-O-methyluridine-3'-phosphate
  modified_base 11: mod_base = OTHER; note = 2'-O-methylguanosine-3'-phosphate
  modified_base 12: mod_base = OTHER; note = 2'-O-methyladenosine-3'-phosphate
  modified_base 13: mod_base = OTHER; note = 2'-O-methyluridine-3'-phosphate
  modified_base 14: mod_base = OTHER; note = 2'-deoxy-2'-fluoroguanosine-3'-phosphate
  modified_base 15: mod_base = OTHER; note = 2'-O-methylcytidine-3'-phosphate
  modified_base 16: mod_base = OTHER; note = 2'-deoxy-2'-fluorouridine-3'-phosphate
  modified_base 17: mod_base = OTHER; note = 2'-O-methylguanosine-3'-phosphate
  modified_base 18: mod_base = OTHER; note = 2'-O-methyluridine-3'-phosphate
  modified_base 19: mod_base = OTHER; note = 2'-O-methylcytidine-3'-phosphate
  modified_base 20: mod_base = OTHER; note = 2'-O-methyladenosine-3'-phosphate
  modified_base 21: mod_base = OTHER; note = 2'-O-methylguanosine-3'-phosphorothioate
  modified_base 22: mod_base = OTHER; note = 2'-O-methylguanosine-3'-phosphorothioate
  modified_base 23: mod_base = OTHER; note = 2'-O-methylguanosine
acttccatgtgatgctgtcaggg

SEQ ID NO: 331 - RNA, 23 nt, synthetic construct
  source 1..23: mol_type = other RNA
  modified_base 1: mod_base = OTHER; note = 2'-O-methyladenosine-3'-phosphorothioate
  modified_base 2: mod_base = OTHER; note = 2'-deoxy-2'-fluoroadenosine-3'-phosphorothioate
  modified_base 3: mod_base = OTHER; note = 2'-O-methyluridine-3'-phosphate
  modified_base 4: mod_base = OTHER; note = 2'-O-methylcytidine-3'-phosphate
  modified_base 5: mod_base = OTHER; note = 2'-O-methyladenosine-3'-phosphate
  modified_base 6: mod_base = OTHER; note = 2'-deoxy-2'-fluorouridine-3'-phosphate
  modified_base 7: mod_base = OTHER; note = 2'-O-methyladenosine-3'-phosphate
  modified_base 8: mod_base = OTHER; note = 2'-deoxy-2'-fluorouridine-3'-phosphate
  modified_base 9: mod_base = OTHER; note = 2'-deoxy-2'-fluoroguanosine-3'-phosphate
  modified_base 10: mod_base = OTHER; note = 2'-O-methylguanosine-3'-phosphate
  modified_base 11: mod_base = OTHER; note = 2'-O-methylcytidine-3'-phosphate
  modified_base 12: mod_base = OTHER; note = 2'-O-methyluridine-3'-phosphate
  modified_base 13: mod_base = OTHER; note = 2'-O-methyluridine-3'-phosphate
  modified_base 14: mod_base = OTHER; note = 2'-deoxy-2'-fluorocytidine-3'-phosphate
  modified_base 15: mod_base = OTHER; note = 2'-O-methylcytidine-3'-phosphate
  modified_base 16: mod_base = OTHER; note = 2'-deoxy-2'-fluoroadenosine-3'-phosphate
  modified_base 17: mod_base = OTHER; note = 2'-O-methyluridine-3'-phosphate
  modified_base 18: mod_base = OTHER; note = 2'-O-methylguanosine-3'-phosphate
  modified_base 19: mod_base = OTHER; note = 2'-O-methyluridine-3'-phosphate
  modified_base 20: mod_base = OTHER; note = 2'-O-methylguanosine-3'-phosphate
  modified_base 21: mod_base = OTHER; note = 2'-O-methyladenosine-3'-phosphorothioate
  modified_base 22: mod_base = OTHER; note = 2'-O-methyluridine-3'-phosphorothioate
  modified_base 23: mod_base = OTHER; note = 2'-O-methylguanosine
aatcatatggcttccatgtgatg

SEQ ID NO: 332 - RNA, 23 nt, synthetic construct
  source 1..23: mol_type = other RNA
  modified_base 1: mod_base = OTHER; note = 2'-O-methyladenosine-3'-phosphorothioate
  modified_base 2: mod_base = OTHER; note = 2'-deoxy-2'-fluoroguanosine-3'-phosphorothioate
  modified_base 3: mod_base = OTHER; note = 2'-O-methyluridine-3'-phosphate
  modified_base 4: mod_base = OTHER; note = 2'-O-methylcytidine-3'-phosphate
  modified_base 5: mod_base = OTHER; note = 2'-O-methylguanosine-3'-phosphate
  modified_base 6: mod_base = OTHER; note = 2'-deoxy-2'-fluoroguanosine-3'-phosphate
  modified_base 7: mod_base = OTHER; note = 2'-O-methylcytidine-3'-phosphate
  modified_base 8: mod_base = OTHER; note = 2'-deoxy-2'-fluorouridine-3'-phosphate
  modified_base 9: mod_base = OTHER; note = 2'-deoxy-2'-fluoroguanosine-3'-phosphate
  modified_base 10: mod_base = OTHER; note = 2'-O-methylcytidine-3'-phosphate
  modified_base 11: mod_base = OTHER; note = 2'-O-methyladenosine-3'-phosphate
  modified_base 12: mod_base = OTHER; note = 2'-O-methyluridine-3'-phosphate
  modified_base 13: mod_base = OTHER; note = 2'-O-methylcytidine-3'-phosphate
  modified_base 14: mod_base = OTHER; note = 2'-deoxy-2'-fluoroadenosine-3'-phosphate
  modified_base 15: mod_base = OTHER; note = 2'-O-methyluridine-3'-phosphate
  modified_base 16: mod_base = OTHER; note = 2'-deoxy-2'-fluoroadenosine-3'-phosphate
  modified_base 17: mod_base = OTHER; note = 2'-O-methyluridine-3'-phosphate
  modified_base 18: mod_base = OTHER; note = 2'-O-methylguanosine-3'-phosphate
  modified_base 19: mod_base = OTHER; note = 2'-O-methylguanosine-3'-phosphate
  modified_base 20: mod_base = OTHER; note = 2'-O-methylcytidine-3'-phosphate
  modified_base 21: mod_base = OTHER; note = 2'-O-methyluridine-3'-phosphorothioate
  modified_base 22: mod_base = OTHER; note = 2'-O-methyluridine-3'-phosphorothioate
  modified_base 23: mod_base = OTHER; note = 2'-O-methylcytidine
agtcggctgcatcatatggcttc

SEQ ID NO: 333 - RNA, 23 nt, synthetic construct
  source 1..23: mol_type = other RNA
  modified_base 1: mod_base = OTHER; note = 2'-O-methyladenosine-3'-phosphorothioate
  modified_base 2: mod_base = OTHER; note = 2'-deoxy-2'-fluoroguanosine-3'-phosphorothioate
  modified_base 3: mod_base = OTHER; note = 2'-O-methyluridine-3'-phosphate
  modified_base 4: mod_base = OTHER; note = 2'-O-methylcytidine-3'-phosphate
  modified_base 5: mod_base = OTHER; note = 2'-O-methyluridine-3'-phosphate
  modified_base 6: mod_base = OTHER; note = 2'-deoxy-2'-fluoroguanosine-3'-phosphate
  modified_base 7: mod_base = OTHER; note = 2'-O-methylguanosine-3'-phosphate
  modified_base 8: mod_base = OTHER; note = 2'-deoxy-2'-fluorouridine-3'-phosphate
  modified_base 9: mod_base = OTHER; note = 2'-deoxy-2'-fluorouridine-3'-phosphate
  modified_base 10: mod_base = OTHER; note = 2'-O-methylguanosine-3'-phosphate
  modified_base 11: mod_base = OTHER; note = 2'-O-methyladenosine-3'-phosphate
  modified_base 12: mod_base = OTHER; note = 2'-O-methyladenosine-3'-phosphate
  modified_base 13: mod_base = OTHER; note = 2'-O-methylguanosine-3'-phosphate
  modified_base 14: mod_base = OTHER; note = 2'-deoxy-2'-fluorouridine-3'-phosphate
  modified_base 15: mod_base = OTHER; note = 2'-O-methylcytidine-3'-phosphate
  modified_base 16: mod_base = OTHER; note = 2'-deoxy-2'-fluoroadenosine-3'-phosphate
  modified_base 17: mod_base = OTHER; note = 2'-O-methyladenosine-3'-phosphate
  modified_base 18: mod_base = OTHER; note = 2'-O-methylguanosine-3'-phosphate
  modified_base 19: mod_base = OTHER; note = 2'-O-methylcytidine-3'-phosphate
  modified_base 20: mod_base = OTHER; note = 2'-O-methyladenosine-3'-phosphate
  modified_base 21: mod_base = OTHER; note = 2'-O-methylguanosine-3'-phosphorothioate
  modified_base 22: mod_base = OTHER; note = 2'-O-methylguanosine-3'-phosphorothioate
  modified_base 23: mod_base = OTHER; note = 2'-O-methyluridine
agtctggttgaagtcaagcaggt

SEQ ID NO: 334 - RNA, 23 nt, synthetic construct
  source 1..23: mol_type = other RNA
  modified_base 1: mod_base = OTHER; note = 2'-O-methyladenosine-3'-phosphorothioate
  modified_base 2: mod_base = OTHER; note = 2'-deoxy-2'-fluorouridine-3'-phosphorothioate
  modified_base 3: mod_base = OTHER; note = 2'-O-methylcytidine-3'-phosphate
  modified_base 4: mod_base = OTHER; note = 2'-O-methyladenosine-3'-phosphate
  modified_base 5: mod_base = OTHER; note = 2'-O-methylguanosine-3'-phosphate
  modified_base 6: mod_base = OTHER; note = 2'-deoxy-2'-fluoroguanosine-3'-phosphate
  modified_base 7: mod_base = OTHER; note = 2'-O-methylcytidine-3'-phosphate
  modified_base 8: mod_base = OTHER; note = 2'-deoxy-2'-fluorouridine-3'-phosphate
  modified_base 9: mod_base = OTHER; note = 2'-deoxy-2'-fluoroguanosine-3'-phosphate
  modified_base 10: mod_base = OTHER; note = 2'-O-methylcytidine-3'-phosphate
  modified_base 11: mod_base = OTHER; note = 2'-O-methylguanosine-3'-phosphate
  modified_base 12: mod_base = OTHER; note = 2'-O-methyluridine-3'-phosphate
  modified_base 13: mod_base = OTHER; note = 2'-O-methylcytidine-3'-phosphate
  modified_base 14: mod_base = OTHER; note = 2'-deoxy-2'-fluorouridine-3'-phosphate
  modified_base 15: mod_base = OTHER; note = 2'-O-methylguanosine-3'-phosphate
  modified_base 16: mod_base = OTHER; note = 2'-deoxy-2'-fluoroguanosine-3'-phosphate
  modified_base 17: mod_base = OTHER; note = 2'-O-methyluridine-3'-phosphate
  modified_base 18: mod_base = OTHER; note = 2'-O-methyluridine-3'-phosphate
  modified_base 19: mod_base = OTHER; note = 2'-O-methylguanosine-3'-phosphate
  modified_base 20: mod_base = OTHER; note = 2'-O-methyladenosine-3'-phosphate
  modified_base 21: mod_base = OTHER; note = 2'-O-methyladenosine-3'-phosphorothioate
  modified_base 22: mod_base = OTHER; note = 2'-O-methylguanosine-3'-phosphorothioate
  modified_base 23: mod_base = OTHER; note = 2'-O-methyluridine
atcaggctgcgtctggttgaagt

SEQ ID NO: 335 - RNA, 23 nt, synthetic construct
  source 1..23: mol_type = other RNA
  modified_base 1: mod_base = OTHER; note = 2'-O-methyladenosine-3'-phosphorothioate
  modified_base 2: mod_base = OTHER; note = 2'-deoxy-2'-fluorouridine-3'-phosphorothioate
  modified_base 3: mod_base = OTHER; note = 2'-O-methylcytidine-3'-phosphate
  modified_base 4: mod_base = OTHER; note = 2'-O-methylcytidine-3'-phosphate
  modified_base 5: mod_base = OTHER; note = 2'-O-methyluridine-3'-phosphate
  modified_base 6: mod_base = OTHER; note = 2'-deoxy-2'-fluoroguanosine-3'-phosphate
  modified_base 7: mod_base = OTHER; note = 2'-O-methylguanosine-3'-phosphate
  modified_base 8: mod_base = OTHER; note = 2'-deoxy-2'-fluorouridine-3'-phosphate
  modified_base 9: mod_base = OTHER; note = 2'-deoxy-2'-fluoroguanosine-3'-phosphate
  modified_base 10: mod_base = OTHER; note = 2'-O-methyladenosine-3'-phosphate
  modified_base 11: mod_base = OTHER; note = 2'-O-methylguanosine-3'-phosphate
  modified_base 12: mod_base = OTHER; note = 2'-O-methylguanosine-3'-phosphate
  modified_base 13: mod_base = OTHER; note = 2'-O-methyluridine-3'-phosphate
  modified_base 14: mod_base = OTHER; note = 2'-deoxy-2'-fluorouridine-3'-phosphate
  modified_base 15: mod_base = OTHER; note = 2'-O-methylguanosine-3'-phosphate
  modified_base 16: mod_base = OTHER; note = 2'-deoxy-2'-fluorouridine-3'-phosphate
  modified_base 17: mod_base = OTHER; note = 2'-O-methyluridine-3'-phosphate
  modified_base 18: mod_base = OTHER; note = 2'-O-methylguanosine-3'-phosphate
  modified_base 19: mod_base = OTHER; note = 2'-O-methyluridine-3'-phosphate
  modified_base 20: mod_base = OTHER; note = 2'-O-methylcytidine-3'-phosphate
  modified_base 21: mod_base = OTHER; note = 2'-O-methylguanosine-3'-phosphorothioate
  modified_base 22: mod_base = OTHER; note = 2'-O-methylcytidine-3'-phosphorothioate
  modified_base 23: mod_base = OTHER; note = 2'-O-methylcytidine
atcctggtgaggttgttgtcgcc

SEQ ID NO: 336 - RNA, 23 nt, synthetic construct
  source 1..23: mol_type = other RNA
  modified_base 1: mod_base = OTHER; note = 2'-O-methyladenosine-3'-phosphorothioate
  modified_base 2: mod_base = OTHER; note = 2'-deoxy-2'-fluorocytidine-3'-phosphorothioate
  modified_base 3: mod_base = OTHER; note = 2'-O-methyluridine-3'-phosphate
  modified_base 4: mod_base = OTHER; note = 2'-O-methylcytidine-3'-phosphate
  modified_base 5: mod_base = OTHER; note = 2'-O-methylcytidine-3'-phosphate
  modified_base 6: mod_base = OTHER; note = 2'-deoxy-2'-fluorocytidine-3'-phosphate
  modified_base 7: mod_base = OTHER; note = 2'-O-methyladenosine-3'-phosphate
  modified_base 8: mod_base = OTHER; note = 2'-deoxy-2'-fluorocytidine-3'-phosphate
  modified_base 9: mod_base = OTHER; note = 2'-deoxy-2'-fluoroguanosine-3'-phosphate
  modified_base 10: mod_base = OTHER; note = 2'-O-methyladenosine-3'-phosphate
  modified_base 11: mod_base = OTHER; note = 2'-O-methyluridine-3'-phosphate
  modified_base 12: mod_base = OTHER; note = 2'-O-methylcytidine-3'-phosphate
  modified_base 13: mod_base = OTHER; note = 2'-O-methylcytidine-3'-phosphate
  modified_base 14: mod_base = OTHER; note = 2'-deoxy-2'-fluorouridine-3'-phosphate
  modified_base 15: mod_base = OTHER; note = 2'-O-methylguanosine-3'-phosphate
  modified_base 16: mod_base = OTHER; note = 2'-deoxy-2'-fluoroguanosine-3'-phosphate
  modified_base 17: mod_base = OTHER; note = 2'-O-methyluridine-3'-phosphate
  modified_base 18: mod_base = OTHER; note = 2'-O-methylguanosine-3'-phosphate
  modified_base 19: mod_base = OTHER; note = 2'-O-methyladenosine-3'-phosphate
  modified_base 20: mod_base = OTHER; note = 2'-O-methylguanosine-3'-phosphate
  modified_base 21: mod_base = OTHER; note = 2'-O-methylguanosine-3'-phosphorothioate
  modified_base 22: mod_base = OTHER; note = 2'-O-methyluridine-3'-phosphorothioate
  modified_base 23: mod_base = OTHER; note = 2'-O-methyluridine
actcccacgatcctggtgaggtt

SEQ ID NO: 337 - RNA, 23 nt, synthetic construct
  source 1..23: mol_type = other RNA
  modified_base 1: mod_base = OTHER; note = 2'-O-methyladenosine-3'-phosphorothioate
  modified_base 2: mod_base = OTHER; note = 2'-deoxy-2'-fluorocytidine-3'-phosphorothioate
  modified_base 3: mod_base = OTHER; note = 2'-O-methylguanosine-3'-phosphate
  modified_base 4: mod_base = OTHER; note = 2'-O-methyluridine-3'-phosphate
  modified_base 5: mod_base = OTHER; note = 2'-O-methylcytidine-3'-phosphate
  modified_base 6: mod_base = OTHER; note = 2'-deoxy-2'-fluorocytidine-3'-phosphate
  modified_base 7: mod_base = OTHER; note = 2'-O-methyluridine-3'-phosphate
  modified_base 8: mod_base = OTHER; note = 2'-deoxy-2'-fluorouridine-3'-phosphate
  modified_base 9: mod_base = OTHER; note = 2'-deoxy-2'-fluoroguanosine-3'-phosphate
  modified_base 10: mod_base = OTHER; note = 2'-O-methylcytidine-3'-phosphate
  modified_base 11: mod_base = OTHER; note = 2'-O-methyladenosine-3'-phosphate
  modified_base 12: mod_base = OTHER; note = 2'-O-methyluridine-3'-phosphate
  modified_base 13: mod_base = OTHER; note = 2'-O-methyluridine-3'-phosphate
  modified_base 14: mod_base = OTHER; note = 2'-deoxy-2'-fluorocytidine-3'-phosphate
  modified_base 15: mod_base = OTHER; note = 2'-O-methylcytidine-3'-phosphate
  modified_base 16: mod_base = OTHER; note = 2'-deoxy-2'-fluorouridine-3'-phosphate
  modified_base 17: mod_base = OTHER; note = 2'-O-methylguanosine-3'-phosphate
  modified_base 18: mod_base = OTHER; note = 2'-O-methylguanosine-3'-phosphate
  modified_base 19: mod_base = OTHER; note = 2'-O-methylcytidine-3'-phosphate
  modified_base 20: mod_base = OTHER; note = 2'-O-methylcytidine-3'-phosphate
  modified_base 21: mod_base = OTHER; note = 2'-O-methyluridine-3'-phosphorothioate
  modified_base 22: mod_base = OTHER; note = 2'-O-methylcytidine-3'-phosphorothioate
  modified_base 23: mod_base = OTHER; note = 2'-O-methylcytidine
acgtccttgcattcctggcctcc

SEQ ID NO: 338 - RNA, 23 nt, synthetic construct
  source 1..23: mol_type = other RNA
  modified_base 1: mod_base = OTHER; note = 2'-O-methyladenosine-3'-phosphorothioate
  modified_base 2: mod_base = OTHER; note = 2'-deoxy-2'-fluorouridine-3'-phosphorothioate
  modified_base 3: mod_base = OTHER; note = 2'-O-methyluridine-3'-phosphate
  modified_base 4: mod_base = OTHER; note = 2'-O-methylguanosine-3'-phosphate
  modified_base 5: mod_base = OTHER; note = 2'-O-methyladenosine-3'-phosphate
  modified_base 6: mod_base = OTHER; note = 2'-deoxy-2'-fluorouridine-3'-phosphate
  modified_base 7: mod_base = OTHER; note = 2'-O-methylguanosine-3'-phosphate
  modified_base 8: mod_base = OTHER; note = 2'-deoxy-2'-fluoroadenosine-3'-phosphate
  modified_base 9: mod_base = OTHER; note = 2'-deoxy-2'-fluoroguanosine-3'-phosphate
  modified_base 10: mod_base = OTHER; note = 2'-O-methylcytidine-3'-phosphate
  modified_base 11: mod_base = OTHER; note = 2'-O-methyladenosine-3'-phosphate
  modified_base 12: mod_base = OTHER; note = 2'-O-methylguanosine-3'-phosphate
  modified_base 13: mod_base = OTHER; note = 2'-O-methylguanosine-3'-phosphate
  modified_base 14: mod_base = OTHER; note = 2'-deoxy-2'-fluoroguanosine-3'-phosphate
  modified_base 15: mod_base = OTHER; note = 2'-O-methylcytidine-3'-phosphate
  modified_base 16: mod_base = OTHER; note = 2'-deoxy-2'-fluorocytidine-3'-phosphate
  modified_base 17: mod_base = OTHER; note = 2'-O-methyluridine-3'-phosphate
  modified_base 18: mod_base = OTHER; note = 2'-O-methylguanosine-3'-phosphate
  modified_base 19: mod_base = OTHER; note = 2'-O-methylcytidine-3'-phosphate
  modified_base 20: mod_base = OTHER; note = 2'-O-methylcytidine-3'-phosphate
  modified_base 21: mod_base = OTHER; note = 2'-O-methyladenosine-3'-phosphorothioate
  modified_base 22: mod_base = OTHER; note = 2'-O-methylguanosine-3'-phosphorothioate
  modified_base 23: mod_base = OTHER; note = 2'-O-methylguanosine
attgatgagcagggcctgccagg

SEQ ID NO: 339 - RNA, 23 nt, synthetic construct
  source 1..23: mol_type = other RNA
  modified_base 1: mod_base = OTHER; note = 2'-O-methyladenosine-3'-phosphorothioate
  modified_base 2: mod_base = OTHER; note = 2'-deoxy-2'-fluorouridine-3'-phosphorothioate
  modified_base 3: mod_base = OTHER; note = 2'-O-methyluridine-3'-phosphate
  modified_base 4: mod_base = OTHER; note = 2'-O-methyluridine-3'-phosphate
  modified_base 5: mod_base = OTHER; note = 2'-O-methyluridine-3'-phosphate
  modified_base 6: mod_base = OTHER; note = 2'-deoxy-2'-fluorocytidine-3'-phosphate
  modified_base 7: mod_base = OTHER; note = 2'-O-methylcytidine-3'-phosphate
  modified_base 8: mod_base = OTHER; note = 2'-deoxy-2'-fluorouridine-3'-phosphate
  modified_base 9: mod_base = OTHER; note = 2'-deoxy-2'-fluorocytidine-3'-phosphate
  modified_base 10: mod_base = OTHER; note = 2'-O-methyladenosine-3'-phosphate
  modified_base 11: mod_base = OTHER; note = 2'-O-methyluridine-3'-phosphate
  modified_base 12: mod_base = OTHER; note = 2'-O-methyluridine-3'-phosphate
  modified_base 13: mod_base = OTHER; note = 2'-O-methylguanosine-3'-phosphate
  modified_base 14: mod_base = OTHER; note = 2'-deoxy-2'-fluoroadenosine-3'-phosphate
  modified_base 15: mod_base = OTHER; note = 2'-O-methyluridine-3'-phosphate
  modified_base 16: mod_base = OTHER; note = 2'-deoxy-2'-fluoroguanosine-3'-phosphate
  modified_base 17: mod_base = OTHER; note = 2'-O-methyladenosine-3'-phosphate
  modified_base 18: mod_base = OTHER; note = 2'-O-methylguanosine-3'-phosphate
  modified_base 19: mod_base = OTHER; note = 2'-O-methylcytidine-3'-phosphate
  modified_base 20: mod_base = OTHER; note = 2'-O-methyladenosine-3'-phosphate
  modified_base 21: mod_base = OTHER; note = 2'-O-methylguanosine-3'-phosphorothioate
  modified_base 22: mod_base = OTHER; note = 2'-O-methylguanosine-3'-phosphorothioate
  modified_base 23: mod_base = OTHER; note = 2'-O-methylguanosine
attttcctcattgatgagcaggg

SEQ ID NO: 340 - RNA, 23 nt, synthetic construct
  source 1..23: mol_type = other RNA
  modified_base 1: mod_base = OTHER; note = 2'-O-methyladenosine-3'-phosphorothioate
  modified_base 2: mod_base = OTHER; note = 2'-deoxy-2'-fluoroadenosine-3'-phosphorothioate
  modified_base 3: mod_base = OTHER; note = 2'-O-methyladenosine-3'-phosphate
  modified_base 4: mod_base = OTHER; note = 2'-O-methyladenosine-3'-phosphate
  modified_base 5: mod_base = OTHER; note = 2'-O-methylcytidine-3'-phosphate
  modified_base 6: mod_base = OTHER; note = 2'-deoxy-2'-fluorocytidine-3'-phosphate
  modified_base 7: mod_base = OTHER; note = 2'-O-methylcytidine-3'-phosphate
  modified_base 8: mod_base = OTHER; note = 2'-deoxy-2'-fluorouridine-3'-phosphate
  modified_base 9: mod_base = OTHER; note = 2'-deoxy-2'-fluorocytidine-3'-phosphate
  modified_base 10: mod_base = OTHER; note = 2'-O-methylguanosine-3'-phosphate
  modified_base 11: mod_base = OTHER; note = 2'-O-methyluridine-3'-phosphate
  modified_base 12: mod_base = OTHER; note = 2'-O-methyluridine-3'-phosphate
  modified_base 13: mod_base = OTHER; note = 2'-O-methyluridine-3'-phosphate
  modified_base 14: mod_base = OTHER; note = 2'-deoxy-2'-fluorouridine-3'-phosphate
  modified_base 15: mod_base = OTHER; note = 2'-O-methylcytidine-3'-phosphate
  modified_base 16: mod_base = OTHER; note = 2'-deoxy-2'-fluorocytidine-3'-phosphate
  modified_base 17: mod_base = OTHER; note = 2'-O-methyluridine-3'-phosphate
  modified_base 18: mod_base = OTHER; note = 2'-O-methylcytidine-3'-phosphate
  modified_base 19: mod_base = OTHER; note = 2'-O-methyladenosine-3'-phosphate
  modified_base 20: mod_base = OTHER; note = 2'-O-methyluridine-3'-phosphate
  modified_base 21: mod_base = OTHER; note = 2'-O-methyluridine-3'-phosphorothioate
  modified_base 22: mod_base = OTHER; note = 2'-O-methylguanosine-3'-phosphorothioate
  modified_base 23: mod_base = OTHER; note = 2'-O-methyladenosine
aaaaccctcgttttcctcattga

SEQ ID NO: 341 - RNA, 23 nt, synthetic construct
  source 1..23: mol_type = other RNA
  modified_base 1: mod_base = OTHER; note = 2'-O-methyladenosine-3'-phosphorothioate
  modified_base 2: mod_base = OTHER; note = 2'-deoxy-2'-fluorocytidine-3'-phosphorothioate
  modified_base 3: mod_base = OTHER; note = 2'-O-methylcytidine-3'-phosphate
  modified_base 4: mod_base = OTHER; note = 2'-O-methyladenosine-3'-phosphate
  modified_base 5: mod_base = OTHER; note = 2'-O-methylcytidine-3'-phosphate
  modified_base 6: mod_base = OTHER; note = 2'-deoxy-2'-fluorocytidine-3'-phosphate
  modified_base 7: mod_base = OTHER; note = 2'-O-methyladenosine-3'-phosphate
  modified_base 8: mod_base = OTHER; note = 2'-deoxy-2'-fluorocytidine-3'-phosphate
  modified_base 9: mod_base = OTHER; note = 2'-deoxy-2'-fluoroadenosine-3'-phosphate
  modified_base 10: mod_base = OTHER; note = 2'-O-methylguanosine-3'-phosphate
  modified_base 11: mod_base = OTHER; note = 2'-O-methyladenosine-3'-phosphate
  modified_base 12: mod_base = OTHER; note = 2'-O-methyladenosine-3'-phosphate
  modified_base 13: mod_base = OTHER; note = 2'-O-methyladenosine-3'-phosphate
  modified_base 14: mod_base = OTHER; note = 2'-deoxy-2'-fluorocytidine-3'-phosphate
  modified_base 15: mod_base = OTHER; note = 2'-O-methylcytidine-3'-phosphate
  modified_base 16: mod_base = OTHER; note = 2'-deoxy-2'-fluorocytidine-3'-phosphate
  modified_base 17: mod_base = OTHER; note = 2'-O-methyluridine-3'-phosphate
  modified_base 18: mod_base = OTHER; note = 2'-O-methylcytidine-3'-phosphate
  modified_base 19: mod_base = OTHER; note = 2'-O-methylguanosine-3'-phosphate
  modified_base 20: mod_base = OTHER; note = 2'-O-methyluridine-3'-phosphate
  modified_base 21: mod_base = OTHER; note = 2'-O-methyluridine-3'-phosphorothioate
  modified_base 22: mod_base = OTHER; note = 2'-O-methyluridine-3'-phosphorothioate
  modified_base 23: mod_base = OTHER; note = 2'-O-methyluridine
accaccacagaaaccctcgtttt

SEQ ID NO: 342 - RNA, 23 nt, synthetic construct
  source 1..23: mol_type = other RNA
  modified_base 1: mod_base = OTHER; note = 2'-O-methyladenosine-3'-phosphorothioate
  modified_base 2: mod_base = OTHER; note = 2'-deoxy-2'-fluoroadenosine-3'-phosphorothioate
  modified_base 3: mod_base = OTHER; note = 2'-O-methylguanosine-3'-phosphate
  modified_base 4: mod_base = OTHER; note = 2'-O-methyladenosine-3'-phosphate
  modified_base 5: mod_base = OTHER; note = 2'-O-methyladenosine-3'-phosphate
  modified_base 6: mod_base = OTHER; note = 2'-deoxy-2'-fluorouridine-3'-phosphate
  modified_base 7: mod_base = OTHER; note = 2'-O-methylguanosine-3'-phosphate
  modified_base 8: mod_base = OTHER; note = 2'-deoxy-2'-fluoroguanosine-3'-phosphate
  modified_base 9: mod_base = OTHER; note = 2'-deoxy-2'-fluorouridine-3'-phosphate
  modified_base 10: mod_base = OTHER; note = 2'-O-methyluridine-3'-phosphate
  modified_base 11: mod_base = OTHER; note = 2'-O-methylcytidine-3'-phosphate
  modified_base 12: mod_base = OTHER; note = 2'-O-methylcytidine-3'-phosphate
  modified_base 13: mod_base = OTHER; note = 2'-O-methyladenosine-3'-phosphate
  modified_base 14: mod_base = OTHER; note = 2'-deoxy-2'-fluorocytidine-3'-phosphate
  modified_base 15: mod_base = OTHER; note = 2'-O-methylcytidine-3'-phosphate
  modified_base 16: mod_base = OTHER; note = 2'-deoxy-2'-fluoroadenosine-3'-phosphate
  modified_base 17: mod_base = OTHER; note = 2'-O-methylcytidine-3'-phosphate
  modified_base 18: mod_base = OTHER; note = 2'-O-methyladenosine-3'-phosphate
  modified_base 19: mod_base = OTHER; note = 2'-O-methylguanosine-3'-phosphate
  modified_base 20: mod_base = OTHER; note = 2'-O-methyladenosine-3'-phosphate
  modified_base 21: mod_base = OTHER; note = 2'-O-methyladenosine-3'-phosphorothioate
  modified_base 22: mod_base = OTHER; note = 2'-O-methyladenosine-3'-phosphorothioate
  modified_base 23: mod_base = OTHER; note = 2'-O-methylcytidine
aagaatggttccaccacagaaac

SEQ ID NO: 343 - RNA, 23 nt, synthetic construct
  source 1..23: mol_type = other RNA
  modified_base 1: mod_base = OTHER; note = 2'-O-methyladenosine-3'-phosphorothioate
  modified_base 2: mod_base = OTHER; note = 2'-deoxy-2'-fluoroadenosine-3'-phosphorothioate
  modified_base 3: mod_base = OTHER; note = 2'-O-methylguanosine-3'-phosphate
  modified_base 4: mod_base = OTHER; note = 2'-O-methyladenosine-3'-phosphate
  modified_base 5: mod_base = OTHER; note = 2'-O-methyladenosine-3'-phosphate
  modified_base 6: mod_base = OTHER; note = 2'-deoxy-2'-fluorocytidine-3'-phosphate
  modified_base 7: mod_base = OTHER; note = 2'-O-methyluridine-3'-phosphate
  modified_base 8: mod_base = OTHER; note = 2'-deoxy-2'-fluorocytidine-3'-phosphate
  modified_base 9: mod_base = OTHER; note = 2'-deoxy-2'-fluoroguanosine-3'-phosphate
  modified_base 10: mod_base = OTHER; note = 2'-O-methylcytidine-3'-phosphate
  modified_base 11: mod_base = OTHER; note = 2'-O-methyluridine-3'-phosphate
  modified_base 12: mod_base = OTHER; note = 2'-O-methylcytidine-3'-phosphate
  modified_base 13: mod_base = OTHER; note = 2'-O-methyladenosine-3'-phosphate
  modified_base 14: mod_base = OTHER; note = 2'-deoxy-2'-fluoroguanosine-3'-phosphate
  modified_base 15: mod_base = OTHER; note = 2'-O-methyladenosine-3'-phosphate
  modified_base 16: mod_base = OTHER; note = 2'-deoxy-2'-fluoroadenosine-3'-phosphate
  modified_base 17: mod_base = OTHER; note = 2'-O-methyluridine-3'-phosphate
  modified_base 18: mod_base = OTHER; note = 2'-O-methylguanosine-3'-phosphate
  modified_base 19: mod_base = OTHER; note = 2'-O-methylguanosine-3'-phosphate
  modified_base 20: mod_base = OTHER; note = 2'-O-methyluridine-3'-phosphate
  modified_base 21: mod_base = OTHER; note = 2'-O-methyluridine-3'-phosphorothioate
  modified_base 22: mod_base = OTHER; note = 2'-O-methylcytidine-3'-phosphorothioate
  modified_base 23: mod_base = OTHER; note = 2'-O-methylcytidine
aagaactcgctcagaatggttcc

SEQ ID NO: 344 - RNA, 23 nt, synthetic construct
  source 1..23: mol_type = other RNA
  modified_base 1: mod_base = OTHER; note = 2'-O-methyladenosine-3'-phosphorothioate
  modified_base 2: mod_base = OTHER; note = 2'-deoxy-2'-fluorouridine-3'-phosphorothioate
  modified_base 3: mod_base = OTHER; note = 2'-O-methyluridine-3'-phosphate
  modified_base 4: mod_base = OTHER; note = 2'-O-methyladenosine-3'-phosphate
  modified_base 5: mod_base = OTHER; note = 2'-O-methylguanosine-3'-phosphate
  modified_base 6: mod_base = OTHER; note = 2'-deoxy-2'-fluoroguanosine-3'-phosphate
  modified_base 7: mod_base = OTHER; note = 2'-O-methyladenosine-3'-phosphate
  modified_base 8: mod_base = OTHER; note = 2'-deoxy-2'-fluorouridine-3'-phosphate
  modified_base 9: mod_base = OTHER; note = 2'-deoxy-2'-fluoroguanosine-3'-phosphate
  modified_base 10: mod_base = OTHER; note = 2'-O-methyluridine-3'-phosphate
  modified_base 11: mod_base = OTHER; note = 2'-O-methyladenosine-3'-phosphate
  modified_base 12: mod_base = OTHER; note = 2'-O-methylguanosine-3'-phosphate
  modified_base 13: mod_base = OTHER; note = 2'-O-methyladenosine-3'-phosphate
  modified_base 14: mod_base = OTHER; note = 2'-deoxy-2'-fluoroadenosine-3'-phosphate
  modified_base 15: mod_base = OTHER; note = 2'-O-methylcytidine-3'-phosphate
  modified_base 16: mod_base = OTHER; note = 2'-deoxy-2'-fluorouridine-3'-phosphate
  modified_base 17: mod_base = OTHER; note = 2'-O-methylcytidine-3'-phosphate
  modified_base 18: mod_base = OTHER; note = 2'-O-methylguanosine-3'-phosphate
  modified_base 19: mod_base = OTHER; note = 2'-O-methylcytidine-3'-phosphate
  modified_base 20: mod_base = OTHER; note = 2'-O-methyluridine-3'-phosphate
  modified_base 21: mod_base = OTHER; note = 2'-O-methylcytidine-3'-phosphorothioate
  modified_base 22: mod_base = OTHER; note = 2'-O-methyladenosine-3'-phosphorothioate
  modified_base 23: mod_base = OTHER; note = 2'-O-methylguanosine
attaggatgtagaactcgctcag

SEQ ID NO: 345 - RNA, 23 nt, synthetic construct
  source 1..23: mol_type = other RNA
  modified_base 1: mod_base = OTHER; note = 2'-O-methyladenosine-3'-phosphorothioate
  modified_base 2: mod_base = OTHER; note = 2'-deoxy-2'-fluoroguanosine-3'-phosphorothioate
  modified_base 3: mod_base = OTHER; note = 2'-O-methylguanosine-3'-phosphate
  modified_base 4: mod_base = OTHER; note = 2'-O-methylguanosine-3'-phosphate
  modified_base 5: mod_base = OTHER; note = 2'-O-methylcytidine-3'-phosphate
  modified_base 6: mod_base = OTHER; note = 2'-deoxy-2'-fluorouridine-3'-phosphate
  modified_base 7: mod_base = OTHER; note = 2'-O-methylguanosine-3'-phosphate
  modified_base 8: mod_base = OTHER; note = 2'-deoxy-2'-fluorocytidine-3'-phosphate
  modified_base 9: mod_base = OTHER; note = 2'-deoxy-2'-fluorocytidine-3'-phosphate
  modified_base 10: mod_base = OTHER; note = 2'-O-methylguanosine-3'-phosphate
  modified_base 11: mod_base = OTHER; note = 2'-O-methyluridine-3'-phosphate
  modified_base 12: mod_base = OTHER; note = 2'-O-methyluridine-3'-phosphate
  modified_base 13: mod_base = OTHER; note = 2'-O-methyladenosine-3'-phosphate
  modified_base 14: mod_base = OTHER; note = 2'-deoxy-2'-fluoroguanosine-3'-phosphate
  modified_base 15: mod_base = OTHER; note = 2'-O-methylguanosine-3'-phosphate
  modified_base 16: mod_base = OTHER; note = 2'-deoxy-2'-fluoroadenosine-3'-phosphate
  modified_base 17: mod_base = OTHER; note = 2'-O-methyluridine-3'-phosphate
  modified_base 18: mod_base = OTHER; note = 2'-O-methylguanosine-3'-phosphate
  modified_base 19: mod_base = OTHER; note = 2'-O-methyluridine-3'-phosphate
  modified_base 20: mod_base = OTHER; note = 2'-O-methyladenosine-3'-phosphate
  modified_base 21: mod_base = OTHER; note = 2'-O-methylguanosine-3'-phosphorothioate
  modified_base 22: mod_base = OTHER; note = 2'-O-methyladenosine-3'-phosphorothioate
  modified_base 23: mod_base = OTHER; note = 2'-O-methyladenosine
agggctgccgttaggatgtagaa

SEQ ID NO: 346 - RNA, 23 nt, synthetic construct
  source 1..23: mol_type = other RNA
  modified_base 1: mod_base = OTHER; note = 2'-O-methyladenosine-3'-phosphorothioate
  modified_base 2: mod_base = OTHER; note = 2'-deoxy-2'-fluoroadenosine-3'-phosphorothioate
  modified_base 3: mod_base = OTHER; note = 2'-O-methylguanosine-3'-phosphate
  modified_base 4: mod_base = OTHER; note = 2'-O-methyladenosine-3'-phosphate
  modified_base 5: mod_base = OTHER; note = 2'-O-methylguanosine-3'-phosphate
  modified_base 6: mod_base = OTHER; note = 2'-deoxy-2'-fluoroadenosine-3'-phosphate
  modified_base 7: mod_base = OTHER; note = 2'-O-methylcytidine-3'-phosphate
  modified_base 8: mod_base = OTHER; note = 2'-deoxy-2'-fluoroadenosine-3'-phosphate
  modified_base 9: mod_base = OTHER; note = 2'-deoxy-2'-fluoroguanosine-3'-phosphate
  modified_base 10: mod_base = OTHER; note = 2'-O-methyluridine-3'-phosphate
  modified_base 11: mod_base = OTHER; note = 2'-O-methylguanosine-3'-phosphate
  modified_base 12: mod_base = OTHER; note = 2'-O-methylguanosine-3'-phosphate
  modified_base 13: mod_base = OTHER; note = 2'-O-methylguanosine-3'-phosphate
  modified_base 14: mod_base = OTHER; note = 2'-deoxy-2'-fluorocytidine-3'-phosphate
  modified_base 15: mod_base = OTHER; note = 2'-O-methyluridine-3'-phosphate
  modified_base 16: mod_base = OTHER; note = 2'-deoxy-2'-fluoroguanosine-3'-phosphate
  modified_base 17: mod_base = OTHER; note = 2'-O-methylcytidine-3'-phosphate
  modified_base 18: mod_base = OTHER; note = 2'-O-methylcytidine-3'-phosphate
  modified_base 19: mod_base = OTHER; note = 2'-O-methylguanosine-3'-phosphate
  modified_base 20: mod_base = OTHER; note = 2'-O-methyluridine-3'-phosphate
  modified_base 21: mod_base = OTHER; note = 2'-O-methyluridine-3'-phosphorothioate
  modified_base 22: mod_base = OTHER; note = 2'-O-methyladenosine-3'-phosphorothioate
  modified_base 23: mod_base = OTHER; note = 2'-O-methylguanosine
aagagacagtgggctgccgttag

SEQ ID NO: 347 - RNA, 23 nt, synthetic construct
  source 1..23: mol_type = other RNA
  modified_base 1: mod_base = OTHER; note = 2'-O-methyladenosine-3'-phosphorothioate
  modified_base 2: mod_base = OTHER; note = 2'-deoxy-2'-fluorouridine-3'-phosphorothioate
  modified_base 3: mod_base = OTHER; note = 2'-O-methylguanosine-3'-phosphate
  modified_base 4: mod_base = OTHER; note = 2'-O-methylguanosine-3'-phosphate
  modified_base 5: mod_base = OTHER; note = 2'-O-methylcytidine-3'-phosphate
  modified_base 6: mod_base = OTHER; note = 2'-deoxy-2'-fluorouridine-3'-phosphate
  modified_base 7: mod_base = OTHER; note = 2'-O-methyluridine-3'-phosphate
  modified_base 8: mod_base = OTHER; note = 2'-deoxy-2'-fluoroguanosine-3'-phosphate
  modified_base 9: mod_base = OTHER; note = 2'-deoxy-2'-fluoroguanosine-3'-phosphate
  modified_base 10: mod_base = OTHER; note = 2'-O-methyluridine-3'-phosphate
  modified_base 11: mod_base = OTHER; note = 2'-O-methyladenosine-3'-phosphate
  modified_base 12: mod_base = OTHER; note = 2'-O-methylguanosine-3'-phosphate
  modified_base 13: mod_base = OTHER; note = 2'-O-methyladenosine-3'-phosphate
  modified_base 14: mod_base = OTHER; note = 2'-deoxy-2'-fluoroguanosine-3'-phosphate
  modified_base 15: mod_base = OTHER; note = 2'-O-methyladenosine-3'-phosphate
  modified_base 16: mod_base = OTHER; note = 2'-deoxy-2'-fluorocytidine-3'-phosphate
  modified_base 17: mod_base = OTHER; note = 2'-O-methyladenosine-3'-phosphate
  modified_base 18: mod_base = OTHER; note = 2'-O-methylguanosine-3'-phosphate
  modified_base 19: mod_base = OTHER; note = 2'-O-methyluridine-3'-phosphate
  modified_base 20: mod_base = OTHER; note = 2'-O-methylguanosine-3'-phosphate
  modified_base 21: mod_base = OTHER; note = 2'-O-methylguanosine-3'-phosphorothioate
  modified_base 22: mod_base = OTHER; note = 2'-O-methylguanosine-3'-phosphorothioate
  modified_base 23: mod_base = OTHER; note = 2'-O-methylcytidine
atggcttggtagagacagtgggc

SEQ ID NO: 348 - RNA, 23 nt, synthetic construct
  source 1..23: mol_type = other RNA
  modified_base 1: mod_base = OTHER; note = 2'-O-methyladenosine-3'-phosphorothioate
  modified_base 2: mod_base = OTHER; note = 2'-deoxy-2'-fluorouridine-3'-phosphorothioate
  modified_base 3: mod_base = OTHER; note = 2'-O-methyluridine-3'-phosphate
  modified_base 4: mod_base = OTHER; note = 2'-O-methylguanosine-3'-phosphate
  modified_base 5: mod_base = OTHER; note = 2'-O-methyladenosine-3'-phosphate
  modified_base 6: mod_base = OTHER; note = 2'-deoxy-2'-fluoroadenosine-3'-phosphate
  modified_base 7: mod_base = OTHER; note = 2'-O-methyluridine-3'-phosphate
  modified_base 8: mod_base = OTHER; note = 2'-deoxy-2'-fluorocytidine-3'-phosphate
  modified_base 9: mod_base = OTHER; note = 2'-deoxy-2'-fluorouridine-3'-phosphate
  modified_base 10: mod_base = OTHER; note = 2'-O-methylcytidine-3'-phosphate
  modified_base 11: mod_base = OTHER; note = 2'-O-methyluridine-3'-phosphate
  modified_base 12: mod_base = OTHER; note = 2'-O-methyluridine-3'-phosphate
  modified_base 13: mod_base = OTHER; note = 2'-O-methylguanosine-3'-phosphate
  modified_base 14: mod_base = OTHER; note = 2'-deoxy-2'-fluoroguanosine-3'-phosphate
  modified_base 15: mod_base = OTHER; note = 2'-O-methylcytidine-3'-phosphate
  modified_base 16: mod_base = OTHER; note = 2'-deoxy-2'-fluorouridine-3'-phosphate
  modified_base 17: mod_base = OTHER; note = 2'-O-methyluridine-3'-phosphate
  modified_base 18: mod_base = OTHER; note = 2'-O-methylguanosine-3'-phosphate
  modified_base 19: mod_base = OTHER; note = 2'-O-methylguanosine-3'-phosphate
  modified_base 20: mod_base = OTHER; note = 2'-O-methyluridine-3'-phosphate
  modified_base 21: mod_base = OTHER; note = 2'-O-methyladenosine-3'-phosphorothioate
  modified_base 22: mod_base = OTHER; note = 2'-O-methylguanosine-3'-phosphorothioate
  modified_base 23: mod_base = OTHER; note = 2'-O-methyladenosine
attgaatctcttggcttggtaga

SEQ ID NO: 349 - RNA, 23 nt, synthetic construct
  source 1..23: mol_type = other RNA
  modified_base 1: mod_base = OTHER; note = 2'-O-methyladenosine-3'-phosphorothioate
  modified_base 2: mod_base = OTHER; note = 2'-deoxy-2'-fluorouridine-3'-phosphorothioate
  modified_base 3: mod_base = OTHER; note = 2'-O-methyladenosine-3'-phosphate
  modified_base 4: mod_base = OTHER; note = 2'-O-methylcytidine-3'-phosphate
  modified_base 5: mod_base = OTHER; note = 2'-O-methylcytidine-3'-phosphate
  modified_base 6: mod_base = OTHER; note = 2'-deoxy-2'-fluorocytidine-3'-phosphate
  modified_base 7: mod_base = OTHER; note = 2'-O-methyluridine-3'-phosphate
  modified_base 8: mod_base = OTHER; note = 2'-deoxy-2'-fluorocytidine-3'-phosphate
  modified_base 9: mod_base = OTHER; note = 2'-deoxy-2'-fluoroadenosine-3'-phosphate
  modified_base 10: mod_base = OTHER; note = 2'-O-methylcytidine-3'-phosphate
  modified_base 11: mod_base = OTHER; note = 2'-O-methylcytidine-3'-phosphate
  modified_base 12: mod_base = OTHER; note = 2'-O-methyluridine-3'-phosphate
  modified_base 13: mod_base = OTHER; note = 2'-O-methyluridine-3'-phosphate
  modified_base 14: mod_base = OTHER; note = 2'-deoxy-2'-fluoroguanosine-3'-phosphate
  modified_base 15: mod_base = OTHER; note = 2'-O-methyladenosine-3'-phosphate
  modified_base 16: mod_base = OTHER; note = 2'-deoxy-2'-fluoroadenosine-3'-phosphate
  modified_base 17: mod_base = OTHER; note = 2'-O-methyluridine-3'-phosphate
  modified_base 18: mod_base = OTHER; note = 2'-O-methylcytidine-3'-phosphate
  modified_base 19: mod_base = OTHER; note = 2'-O-methyluridine-3'-phosphate
  modified_base 20: mod_base = OTHER; note = 2'-O-methylcytidine-3'-phosphate
  modified_base 21: mod_base = OTHER; note = 2'-O-methyluridine-3'-phosphorothioate
  modified_base 22: mod_base = OTHER; note = 2'-O-methyluridine-3'-phosphorothioate
  modified_base 23: mod_base = OTHER; note = 2'-O-methylguanosine
ataccctcaccttgaatctcttg

SEQ ID NO: 350 - RNA, 23 nt, synthetic construct
  source 1..23: mol_type = other RNA
  modified_base 1: mod_base = OTHER; note = 2'-O-methyladenosine-3'-phosphorothioate
  modified_base 2: mod_base = OTHER; note = 2'-deoxy-2'-fluorouridine-3'-phosphorothioate
  modified_base 3: mod_base = OTHER; note = 2'-O-methyluridine-3'-phosphate
  modified_base 4: mod_base = OTHER; note = 2'-O-methylguanosine-3'-phosphate
  modified_base 5: mod_base = OTHER; note = 2'-O-methyladenosine-3'-phosphate
  modified_base 6: mod_base = OTHER; note = 2'-deoxy-2'-fluorouridine-3'-phosphate
  modified_base 7: mod_base = OTHER; note = 2'-O-methylguanosine-3'-phosphate
  modified_base 8: mod_base = OTHER; note = 2'-deoxy-2'-fluoroadenosine-3'-phosphate
  modified_base 9: mod_base = OTHER; note = 2'-deoxy-2'-fluorocytidine-3'-phosphate
  modified_base 10: mod_base = OTHER; note = 2'-O-methylcytidine-3'-phosphate
  modified_base 11: mod_base = OTHER; note = 2'-O-methyladenosine-3'-phosphate
  modified_base 12: mod_base = OTHER; note = 2'-O-methylcytidine-3'-phosphate
  modified_base 13: mod_base = OTHER; note = 2'-O-methylcytidine-3'-phosphate
  modified_base 14: mod_base = OTHER; note = 2'-deoxy-2'-fluorouridine-3'-phosphate
  modified_base 15: mod_base = OTHER; note = 2'-O-methylcytidine-3'-phosphate
  modified_base 16: mod_base = OTHER; note = 2'-deoxy-2'-fluorocytidine-3'-phosphate
  modified_base 17: mod_base = OTHER; note = 2'-O-methyladenosine-3'-phosphate
  modified_base 18: mod_base = OTHER; note = 2'-O-methylcytidine-3'-phosphate
  modified_base 19: mod_base = OTHER; note = 2'-O-methylcytidine-3'-phosphate
  modified_base 20: mod_base = OTHER; note = 2'-O-methyluridine-3'-phosphate
  modified_base 21: mod_base = OTHER; note = 2'-O-methylcytidine-3'-phosphorothioate
  modified_base 22: mod_base = OTHER; note = 2'-O-methylguanosine-3'-phosphorothioate
  modified_base 23: mod_base = OTHER; note = 2'-O-methyluridine
attgatgaccacctccacctcgt

SEQ ID NO: 351 - RNA, 23 nt, synthetic construct
  source 1..23: mol_type = other RNA
  modified_base 1: mod_base = OTHER; note = 2'-O-methyladenosine-3'-phosphorothioate
  modified_base 2: mod_base = OTHER; note = 2'-deoxy-2'-fluorocytidine-3'-phosphorothioate
  modified_base 3: mod_base = OTHER; note = 2'-O-methylguanosine-3'-phosphate
  modified_base 4: mod_base = OTHER; note = 2'-O-methylguanosine-3'-phosphate
  modified_base 5: mod_base = OTHER; note = 2'-O-methyluridine-3'-phosphate
  modified_base 6: mod_base = OTHER; note = 2'-deoxy-2'-fluorouridine-3'-phosphate
  modified_base 7: mod_base = OTHER; note = 2'-O-methylguanosine-3'-phosphate
  modified_base 8: mod_base = OTHER; note = 2'-deoxy-2'-fluorouridine-3'-phosphate
  modified_base 9: mod_base = OTHER; note = 2'-deoxy-2'-fluoroguanosine-3'-phosphate
  modified_base 10: mod_base = OTHER; note = 2'-O-methylcytidine-3'-phosphate
  modified_base 11: mod_base = OTHER; note = 2'-O-methyluridine-3'-phosphate
  modified_base 12: mod_base = OTHER; note = 2'-O-methyluridine-3'-phosphate
  modified_base 13: mod_base = OTHER; note = 2'-O-methylguanosine-3'-phosphate
  modified_base 14: mod_base = OTHER; note = 2'-deoxy-2'-fluoroadenosine-3'-phosphate
  modified_base 15: mod_base = OTHER; note = 2'-O-methyluridine-3'-phosphate
  modified_base 16: mod_base = OTHER; note = 2'-deoxy-2'-fluoroguanosine-3'-phosphate
  modified_base 17: mod_base = OTHER; note = 2'-O-methyladenosine-3'-phosphate
  modified_base 18: mod_base = OTHER; note = 2'-O-methylcytidine-3'-phosphate
  modified_base 19: mod_base = OTHER; note = 2'-O-methylcytidine-3'-phosphate
  modified_base 20: mod_base = OTHER; note = 2'-O-methyladenosine-3'-phosphate
  modified_base 21: mod_base = OTHER; note = 2'-O-methylcytidine-3'-phosphorothioate
  modified_base 22: mod_base = OTHER; note = 2'-O-methylcytidine-3'-phosphorothioate
  modified_base 23: mod_base = OTHER; note = 2'-O-methyluridine
acggttgtgcttgatgaccacct

SEQ ID NO: 352 - RNA, 23 nt, synthetic construct
  source 1..23: mol_type = other RNA
  modified_base 1: mod_base = OTHER; note = 2'-O-methyladenosine-3'-phosphorothioate
  modified_base 2: mod_base = OTHER; note = 2'-deoxy-2'-fluorouridine-3'-phosphorothioate
  modified_base 3: mod_base = OTHER; note = 2'-O-methyluridine-3'-phosphate
  modified_base 4: mod_base = OTHER; note = 2'-O-methyluridine-3'-phosphate
  modified_base 5: mod_base = OTHER; note = 2'-O-methylguanosine-3'-phosphate
  modified_base 6: mod_base = OTHER; note = 2'-deoxy-2'-fluorouridine-3'-phosphate
  modified_base 7: mod_base = OTHER; note = 2'-O-methylguanosine-3'-phosphate
  modified_base 8: mod_base = OTHER; note = 2'-deoxy-2'-fluoroadenosine-3'-phosphate
  modified_base 9: mod_base = OTHER; note = 2'-deoxy-2'-fluoroadenosine-3'-phosphate
  modified_base 10: mod_base = OTHER; note = 2'-O-methylcytidine-3'-phosphate
  modified_base 11: mod_base = OTHER; note = 2'-O-methylcytidine-3'-phosphate
  modified_base 12: mod_base = OTHER; note = 2'-O-methylguanosine-3'-phosphate
  modified_base 13: mod_base = OTHER; note = 2'-O-methylguanosine-3'-phosphate
  modified_base 14: mod_base = OTHER; note = 2'-deoxy-2'-fluorouridine-3'-phosphate
  modified_base 15: mod_base = OTHER; note = 2'-O-methyluridine-3'-phosphate
  modified_base 16: mod_base = OTHER; note = 2'-deoxy-2'-fluoroguanosine-3'-phosphate
  modified_base 17: mod_base = OTHER; note = 2'-O-methyluridine-3'-phosphate
  modified_base 18: mod_base = OTHER; note = 2'-O-methylguanosine-3'-phosphate
  modified_base 19: mod_base = OTHER; note = 2'-O-methylcytidine-3'-phosphate
  modified_base 20: mod_base = OTHER; note = 2'-O-methyluridine-3'-phosphate
  modified_base 21: mod_base = OTHER; note = 2'-O-methyluridine-3'-phosphorothioate
  modified_base 22: mod_base = OTHER; note = 2'-O-methylguanosine-3'-phosphorothioate
  modified_base 23: mod_base = OTHER; note = 2'-O-methyladenosine
atttgtgaaccggttgtgcttga

SEQ ID NO: 353 - RNA, 23 nt, synthetic construct
  source 1..23: mol_type = other RNA
  modified_base 1: mod_base = OTHER; note = 2'-O-methyladenosine-3'-phosphorothioate
  modified_base 2: mod_base = OTHER; note = 2'-deoxy-2'-fluoroadenosine-3'-phosphorothioate
  modified_base 3: mod_base = OTHER; note = 2'-O-methyladenosine-3'-phosphate
  modified_base 4: mod_base = OTHER; note = 2'-O-methylguanosine-3'-phosphate
  modified_base 5: mod_base = OTHER; note = 2'-O-methyluridine-3'-phosphate
  modified_base 6: mod_base = OTHER; note = 2'-deoxy-2'-fluorocytidine-3'-phosphate
  modified_base 7: mod_base = OTHER; note = 2'-O-methyladenosine-3'-phosphate
  modified_base 8: mod_base = OTHER; note = 2'-deoxy-2'-fluorouridine-3'-phosphate
  modified_base 9: mod_base = OTHER; note = 2'-deoxy-2'-fluoroadenosine-3'-phosphate
  modified_base 10: mod_base = OTHER; note = 2'-O-methylguanosine-3'-phosphate
  modified_base 11: mod_base = OTHER; note = 2'-O-methylguanosine-3'-phosphate
  modified_base 12: mod_base = OTHER; note = 2'-O-methyluridine-3'-phosphate
  modified_base 13: mod_base = OTHER; note = 2'-O-methylcytidine-3'-phosphate
  modified_base 14: mod_base = OTHER; note = 2'-deoxy-2'-fluorouridine-3'-phosphate
  modified_base 15: mod_base = OTHER; note = 2'-O-methylcytidine-3'-phosphate
  modified_base 16: mod_base = OTHER; note = 2'-deoxy-2'-fluorocytidine-3'-phosphate
  modified_base 17: mod_base = OTHER; note = 2'-O-methyluridine-3'-phosphate
  modified_base 18: mod_base = OTHER; note = 2'-O-methyluridine-3'-phosphate
  modified_base 19: mod_base = OTHER; note = 2'-O-methyluridine-3'-phosphate
  modified_base 20: mod_base = OTHER; note = 2'-O-methylguanosine-3'-phosphate
  modified_base 21: mod_base = OTHER; note = 2'-O-methyluridine-3'-phosphorothioate
  modified_base 22: mod_base = OTHER; note = 2'-O-methylguanosine-3'-phosphorothioate
  modified_base 23: mod_base = OTHER; note = 2'-O-methyladenosine
aaagtcataggtctcctttgtga

SEQ ID NO: 354 - RNA, 23 nt, synthetic construct
  source 1..23: mol_type = other RNA
  modified_base 1: mod_base = OTHER; note = 2'-O-methyladenosine-3'-phosphorothioate
  modified_base 2: mod_base = OTHER; note = 2'-deoxy-2'-fluoroguanosine-3'-phosphorothioate
  modified_base 3: mod_base = OTHER; note = 2'-O-methylcytidine-3'-phosphate
  modified_base 4: mod_base = OTHER; note = 2'-O-methylguanosine-3'-phosphate
  modified_base 5: mod_base = OTHER; note = 2'-O-methyladenosine-3'-phosphate
  modified_base 6: mod_base = OTHER; note = 2'-deoxy-2'-fluorouridine-3'-phosphate
  modified_base 7: mod_base = OTHER; note = 2'-O-methylguanosine-3'-phosphate
  modified_base 8: mod_base = OTHER; note = 2'-deoxy-2'-fluorouridine-3'-phosphate
  modified_base 9: mod_base = OTHER; note = 2'-deoxy-2'-fluorocytidine-3'-phosphate
  modified_base 10: mod_base = OTHER; note = 2'-O-methylguanosine-3'-phosphate
  modified_base 11: mod_base = OTHER; note = 2'-O-methyladenosine-3'-phosphate
  modified_base 12: mod_base = OTHER; note = 2'-O-methyladenosine-3'-phosphate
  modified_base 13: mod_base = OTHER; note = 2'-O-methylguanosine-3'-phosphate
  modified_base 14: mod_base = OTHER; note = 2'-deoxy-2'-fluorouridine-3'-phosphate
  modified_base 15: mod_base = OTHER; note = 2'-O-methylcytidine-3'-phosphate
  modified_base 16: mod_base = OTHER; note = 2'-deoxy-2'-fluoroadenosine-3'-phosphate
  modified_base 17: mod_base = OTHER; note = 2'-O-methyluridine-3'-phosphate
  modified_base 18: mod_base = OTHER; note = 2'-O-methyladenosine-3'-phosphate
  modified_base 19: mod_base = OTHER; note = 2'-O-methylguanosine-3'-phosphate
  modified_base 20: mod_base = OTHER; note = 2'-O-methylguanosine-3'-phosphate
  modified_base 21: mod_base = OTHER; note = 2'-O-methyluridine-3'-phosphorothioate
  modified_base 22: mod_base = OTHER; note = 2'-O-methylcytidine-3'-phosphorothioate
  modified_base 23: mod_base = OTHER; note = 2'-O-methyluridine
agcgatgtcgaagtcataggtct

SEQ ID NO: 355 - RNA, 23 nt, synthetic construct
  source 1..23: mol_type = other RNA
  modified_base 1: mod_base = OTHER; note = 2'-O-methyladenosine-3'-phosphorothioate
  modified_base 2: mod_base = OTHER; note = 2'-deoxy-2'-fluorocytidine-3'-phosphorothioate
  modified_base 3: mod_base = OTHER; note = 2'-O-methylguanosine-3'-phosphate
  modified_base 4: mod_base = OTHER; note = 2'-O-methylguanosine-3'-phosphate
  modified_base 5: mod_base = OTHER; note = 2'-O-methyladenosine-3'-phosphate
  modified_base 6: mod_base = OTHER; note = 2'-deoxy-2'-fluoroguanosine-3'-phosphate
  modified_base 7: mod_base = OTHER; note = 2'-O-methylcytidine-3'-phosphate
  modified_base 8: mod_base = OTHER; note = 2'-deoxy-2'-fluoroadenosine-3'-phosphate
  modified_base 9: mod_base = OTHER; note = 2'-deoxy-2'-fluorocytidine-3'-phosphate
  modified_base 10: mod_base = OTHER; note = 2'-O-methylguanosine-3'-phosphate
  modified_base 11: mod_base = OTHER; note = 2'-O-methylguanosine-3'-phosphate
  modified_base 12: mod_base = OTHER; note = 2'-O-methylcytidine-3'-phosphate
  modified_base 13: mod_base = OTHER; note = 2'-O-methylguanosine-3'-phosphate
  modified_base 14: mod_base = OTHER; note = 2'-deoxy-2'-fluoroadenosine-3'-phosphate
  modified_base 15: mod_base = OTHER; note = 2'-O-methyluridine-3'-phosphate
  modified_base 16: mod_base = OTHER; note = 2'-deoxy-2'-fluoroguanosine-3'-phosphate
  modified_base 17: mod_base = OTHER; note = 2'-O-methyluridine-3'-phosphate
  modified_base 18: mod_base = OTHER; note = 2'-O-methylcytidine-3'-phosphate
  modified_base 19: mod_base = OTHER; note = 2'-O-methylguanosine-3'-phosphate
  modified_base 20: mod_base = OTHER; note = 2'-O-methyladenosine-3'-phosphate
  modified_base 21: mod_base = OTHER; note = 2'-O-methyladenosine-3'-phosphorothioate
  modified_base 22: mod_base = OTHER; note = 2'-O-methylguanosine-3'-phosphorothioate
  modified_base 23: mod_base = OTHER; note = 2'-O-methyluridine
acggagcacggcgatgtcgaagt

SEQ ID NO: 356 - RNA, 23 nt, synthetic construct
  source 1..23: mol_type = other RNA
  modified_base 1: mod_base = OTHER; note = 2'-O-methyladenosine-3'-phosphorothioate
  modified_base 2: mod_base = OTHER; note = 2'-deoxy-2'-fluoroadenosine-3'-phosphorothioate
  modified_base 3: mod_base = OTHER; note = 2'-O-methylcytidine-3'-phosphate
  modified_base 4: mod_base = OTHER; note = 2'-O-methylguanosine-3'-phosphate
  modified_base 5: mod_base = OTHER; note = 2'-O-methyluridine-3'-phosphate
  modified_base 6: mod_base = OTHER; note = 2'-deoxy-2'-fluorouridine-3'-phosphate
  modified_base 7: mod_base = OTHER; note = 2'-O-methylcytidine-3'-phosphate
  modified_base 8: mod_base = OTHER; note = 2'-deoxy-2'-fluoroadenosine-3'-phosphate
  modified_base 9: mod_base = OTHER; note = 2'-deoxy-2'-fluorouridine-3'-phosphate
  modified_base 10: mod_base = OTHER; note = 2'-O-methylguanosine-3'-phosphate
  modified_base 11: mod_base = OTHER; note = 2'-O-methylcytidine-3'-phosphate
  modified_base 12: mod_base = OTHER; note = 2'-O-methylguanosine-3'-phosphate
  modified_base 13: mod_base = OTHER; note = 2'-O-methylguanosine-3'-phosphate
  modified_base 14: mod_base = OTHER; note = 2'-deoxy-2'-fluoroadenosine-3'-phosphate
  modified_base 15: mod_base = OTHER; note = 2'-O-methyladenosine-3'-phosphate
  modified_base 16: mod_base = OTHER; note = 2'-deoxy-2'-fluoroguanosine-3'-phosphate
  modified_base 17: mod_base = OTHER; note = 2'-O-methylguanosine-3'-phosphate
  modified_base 18: mod_base = OTHER; note = 2'-O-methyluridine-3'-phosphate
  modified_base 19: mod_base = OTHER; note = 2'-O-methylguanosine-3'-phosphate
  modified_base 20: mod_base = OTHER; note = 2'-O-methyladenosine-3'-phosphate
  modified_base 21: mod_base = OTHER; note = 2'-O-methyluridine-3'-phosphorothioate
  modified_base 22: mod_base = OTHER; note = 2'-O-methylguanosine-3'-phosphorothioate
  modified_base 23: mod_base = OTHER; note = 2'-O-methylguanosine
aacgttcatgcggaaggtgatgg

SEQ ID NO: 357 - RNA, 23 nt, synthetic construct
  source 1..23: mol_type = other RNA
  modified_base 1: mod_base = OTHER; note = 2'-O-methyladenosine-3'-phosphorothioate
  modified_base 2: mod_base = OTHER; note = 2'-deoxy-2'-fluoroadenosine-3'-phosphorothioate
  modified_base 3: mod_base = OTHER; note = 2'-O-methyluridine-3'-phosphate
  modified_base 4: mod_base = OTHER; note = 2'-O-methylcytidine-3'-phosphate
  modified_base 5: mod_base = OTHER; note = 2'-O-methyladenosine-3'-phosphate
  modified_base 6: mod_base = OTHER; note = 2'-deoxy-2'-fluoroguanosine-3'-phosphate
  modified_base 7: mod_base = OTHER; note = 2'-O-methylcytidine-3'-phosphate
  modified_base 8: mod_base = OTHER; note = 2'-deoxy-2'-fluoroguanosine-3'-phosphate
  modified_base 9: mod_base = OTHER; note = 2'-deoxy-2'-fluorouridine-3'-phosphate
  modified_base 10: mod_base = OTHER; note = 2'-O-methylguanosine-3'-phosphate
  modified_base 11: mod_base = OTHER; note = 2'-O-methylguanosine-3'-phosphate
  modified_base 12: mod_base = OTHER; note = 2'-O-methyladenosine-3'-phosphate
  modified_base 13: mod_base = OTHER; note = 2'-O-methylcytidine-3'-phosphate
  modified_base 14: mod_base = OTHER; note = 2'-deoxy-2'-fluorouridine-3'-phosphate
  modified_base 15: mod_base = OTHER; note = 2'-O-methylcytidine-3'-phosphate
  modified_base 16: mod_base = OTHER; note = 2'-deoxy-2'-fluoroguanosine-3'-phosphate
  modified_base 17: mod_base = OTHER; note = 2'-O-methylguanosine-3'-phosphate
  modified_base 18: mod_base = OTHER; note = 2'-O-methylcytidine-3'-phosphate
  modified_base 19: mod_base = OTHER; note = 2'-O-methylcytidine-3'-phosphate
  modified_base 20: mod_base = OTHER; note = 2'-O-methylcytidine-3'-phosphate
  modified_base 21: mod_base = OTHER; note = 2'-O-methyladenosine-3'-phosphorothioate
  modified_base 22: mod_base = OTHER; note = 2'-O-methylguanosine-3'-phosphorothioate
  modified_base 23: mod_base = OTHER; note = 2'-O-methyluridine
aatcagcgtggactcggcccagt

SEQ ID NO: 358 - RNA, 23 nt, synthetic construct
  source 1..23: mol_type = other RNA
  modified_base 1: mod_base = OTHER; note = 2'-O-methyladenosine-3'-phosphorothioate
  modified_base 2: mod_base = OTHER; note = 2'-deoxy-2'-fluoroguanosine-3'-phosphorothioate
  modified_base 3: mod_base = OTHER; note = 2'-O-methyluridine-3'-phosphate
  modified_base 4: mod_base = OTHER; note = 2'-O-methylcytidine-3'-phosphate
  modified_base 5: mod_base = OTHER; note = 2'-O-methyluridine-3'-phosphate
  modified_base 6: mod_base = OTHER; note = 2'-deoxy-2'-fluorouridine-3'-phosphate
  modified_base 7: mod_base = OTHER; note = 2'-O-methylcytidine-3'-phosphate
  modified_base 8: mod_base = OTHER; note = 2'-deoxy-2'-fluorouridine-3'-phosphate
  modified_base 9: mod_base = OTHER; note = 2'-deoxy-2'-fluoroguanosine-3'-phosphate
  modified_base 10: mod_base = OTHER; note = 2'-O-methylcytidine-3'-phosphate
  modified_base 11: mod_base = OTHER; note = 2'-O-methylguanosine-3'-phosphate
  modified_base 12: mod_base = OTHER; note = 2'-O-methyluridine-3'-phosphate
  modified_base 13: mod_base = OTHER; note = 2'-O-methylcytidine-3'-phosphate
  modified_base 14: mod_base = OTHER; note = 2'-deoxy-2'-fluoroadenosine-3'-phosphate
  modified_base 15: mod_base = OTHER; note = 2'-O-methyluridine-3'-phosphate
  modified_base 16: mod_base = OTHER; note = 2'-deoxy-2'-fluorocytidine-3'-phosphate
  modified_base 17: mod_base = OTHER; note = 2'-O-methyladenosine-3'-phosphate
  modified_base 18: mod_base = OTHER; note = 2'-O-methylguanosine-3'-phosphate
  modified_base 19: mod_base = OTHER; note = 2'-O-methylcytidine-3'-phosphate
  modified_base 20: mod_base = OTHER; note = 2'-O-methylguanosine-3'-phosphate
  modified_base 21: mod_base = OTHER; note = 2'-O-methyluridine-3'-phosphorothioate
  modified_base 22: mod_base = OTHER; note = 2'-O-methylguanosine-3'-phosphorothioate
  modified_base 23: mod_base = OTHER; note = 2'-O-methylguanosine
agtcttctgcgtcatcagcgtgg

SEQ ID NO: 359 - RNA, 23 nt, synthetic construct
  source 1..23: mol_type = other RNA
  modified_base 1: mod_base = OTHER; note = 2'-O-methyladenosine-3'-phosphorothioate
  modified_base 2: mod_base = OTHER; note = 2'-deoxy-2'-fluoroadenosine-3'-phosphorothioate
  modified_base 3: mod_base = OTHER; note = 2'-O-methyluridine-3'-phosphate
  modified_base 4: mod_base = OTHER; note = 2'-O-methylcytidine-3'-phosphate
  modified_base 5: mod_base = OTHER; note = 2'-O-methyluridine-3'-phosphate
  modified_base 6: mod_base = OTHER; note = 2'-deoxy-2'-fluorouridine-3'-phosphate
  modified_base 7: mod_base = OTHER; note = 2'-O-methylguanosine-3'-phosphate
  modified_base 8: mod_base = OTHER; note = 2'-deoxy-2'-fluoroadenosine-3'-phosphate
  modified_base 9: mod_base = OTHER; note = 2'-deoxy-2'-fluoroguanosine-3'-phosphate
  modified_base 10: mod_base = OTHER; note = 2'-O-methylcytidine-3'-phosphate
  modified_base 11: mod_base = OTHER; note = 2'-O-methylcytidine-3'-phosphate
  modified_base 12: mod_base = OTHER; note = 2'-O-methyluridine-3'-phosphate
  modified_base 13: mod_base = OTHER; note = 2'-O-methylguanosine-3'-phosphate
  modified_base 14: mod_base = OTHER; note = 2'-deoxy-2'-fluoroguanosine-3'-phosphate
  modified_base 15: mod_base = OTHER; note = 2'-O-methyluridine-3'-phosphate
  modified_base 16: mod_base = OTHER; note = 2'-deoxy-2'-fluoroguanosine-3'-phosphate
  modified_base 17: mod_base = OTHER; note = 2'-O-methylguanosine-3'-phosphate
  modified_base 18: mod_base = OTHER; note = 2'-O-methyladenosine-3'-phosphate
  modified_base 19: mod_base = OTHER; note = 2'-O-methylcytidine-3'-phosphate
  modified_base 20: mod_base = OTHER; note = 2'-O-methyluridine-3'-phosphate
  modified_base 21: mod_base = OTHER; note = 2'-O-methylguanosine-3'-phosphorothioate
  modified_base 22: mod_base = OTHER; note = 2'-O-methylcytidine-3'-phosphorothioate
  modified_base 23: mod_base = OTHER; note = 2'-O-methylcytidine
aatcttgagcctggtggactgcc

SEQ ID NO: 360 - RNA, 23 nt, synthetic construct
  source 1..23: mol_type = other RNA
  modified_base 1: mod_base = OTHER; note = 2'-O-methyladenosine-3'-phosphorothioate
  modified_base 2: mod_base = OTHER; note = 2'-deoxy-2'-fluoroadenosine-3'-phosphorothioate
  modified_base 3: mod_base = OTHER; note = 2'-O-methylcytidine-3'-phosphate
  modified_base 4: mod_base = OTHER; note = 2'-O-methylcytidine-3'-phosphate
  modified_base 5: mod_base = OTHER; note = 2'-O-methyluridine-3'-phosphate
  modified_base 6: mod_base = OTHER; note = 2'-deoxy-2'-fluorocytidine-3'-phosphate
  modified_base 7: mod_base = OTHER; note = 2'-O-methylcytidine-3'-phosphate
  modified_base 8: mod_base = OTHER; note = 2'-deoxy-2'-fluoroadenosine-3'-phosphate
  modified_base 9: mod_base = OTHER; note = 2'-deoxy-2'-fluoroguanosine-3'-phosphate
  modified_base 10: mod_base = OTHER; note = 2'-O-methylcytidine-3'-phosphate
  modified_base 11: mod_base = OTHER; note = 2'-O-methyladenosine-3'-phosphate
  modified_base 12: mod_base = OTHER; note = 2'-O-methyluridine-3'-phosphate
  modified_base 13: mod_base = OTHER; note = 2'-O-methylcytidine-3'-phosphate
  modified_base 14: mod_base = OTHER; note = 2'-deoxy-2'-fluorouridine-3'-phosphate
  modified_base 15: mod_base = OTHER; note = 2'-O-methyluridine-3'-phosphate
  modified_base 16: mod_base = OTHER; note = 2'-deoxy-2'-fluoroguanosine-3'-phosphate
  modified_base 17: mod_base = OTHER; note = 2'-O-methyladenosine-3'-phosphate
  modified_base 18: mod_base = OTHER; note = 2'-O-methylguanosine-3'-phosphate
  modified_base 19: mod_base = OTHER; note = 2'-O-methylcytidine-3'-phosphate
  modified_base 20: mod_base = OTHER; note = 2'-O-methylcytidine-3'-phosphate
  modified_base 21: mod_base = OTHER; note = 2'-O-methyluridine-3'-phosphorothioate
  modified_base 22: mod_base = OTHER; note = 2'-O-methylguanosine-3'-phosphorothioate
  modified_base 23: mod_base = OTHER; note = 2'-O-methylguanosine
aacctccagcatcttgagcctgg

SEQ ID NO: 361 - RNA, 23 nt, synthetic construct
  source 1..23: mol_type = other RNA
  modified_base 1: mod_base = OTHER; note = 2'-O-methyladenosine-3'-phosphorothioate
  modified_base 2: mod_base = OTHER; note = 2'-deoxy-2'-fluorouridine-3'-phosphorothioate
  modified_base 3: mod_base = OTHER; note = 2'-O-methylcytidine-3'-phosphate
  modified_base 4: mod_base = OTHER; note = 2'-O-methylcytidine-3'-phosphate
  modified_base 5: mod_base = OTHER; note = 2'-O-methyladenosine-3'-phosphate
  modified_base 6: mod_base = OTHER; note = 2'-deoxy-2'-fluorocytidine-3'-phosphate
  modified_base 7: mod_base = OTHER; note = 2'-O-methylguanosine-3'-phosphate
  modified_base 8: mod_base = OTHER; note = 2'-deoxy-2'-fluorouridine-3'-phosphate
  modified_base 9: mod_base = OTHER; note = 2'-deoxy-2'-fluoroadenosine-3'-phosphate
  modified_base 10: mod_base = OTHER; note = 2'-O-methylguanosine-3'-phosphate
  modified_base 11: mod_base = OTHER; note = 2'-O-methylguanosine-3'-phosphate
  modified_base 12: mod_base = OTHER; note = 2'-O-methylguanosine-3'-phosphate
  modified_base 13: mod_base = OTHER; note = 2'-O-methylcytidine-3'-phosphate
  modified_base 14: mod_base = OTHER; note = 2'-deoxy-2'-fluoroadenosine-3'-phosphate
  modified_base 15: mod_base = OTHER; note = 2'-O-methylcytidine-3'-phosphate
  modified_base 16: mod_base = OTHER; note = 2'-deoxy-2'-fluorocytidine-3'-phosphate
  modified_base 17: mod_base = OTHER; note = 2'-O-methyluridine-3'-phosphate
  modified_base 18: mod_base = OTHER; note = 2'-O-methylcytidine-3'-phosphate
  modified_base 19: mod_base = OTHER; note = 2'-O-methylcytidine-3'-phosphate
  modified_base 20: mod_base = OTHER; note = 2'-O-methyladenosine-3'-phosphate
  modified_base 21: mod_base = OTHER; note = 2'-O-methylguanosine-3'-phosphorothioate
  modified_base 22: mod_base = OTHER; note = 2'-O-methylcytidine-3'-phosphorothioate
  modified_base 23: mod_base = OTHER; note = 2'-O-methyladenosine
atccacgtagggcacctccagca

SEQ ID NO: 362 - RNA, 23 nt, synthetic construct
  source 1..23: mol_type = other RNA
  modified_base 1: mod_base = OTHER; note = 2'-O-methyladenosine-3'-phosphorothioate
  modified_base 2: mod_base = OTHER; note = 2'-deoxy-2'-fluoroadenosine-3'-phosphorothioate
  modified_base 3: mod_base = OTHER; note = 2'-O-methylguanosine-3'-phosphate
  modified_base 4: mod_base = OTHER; note = 2'-O-methylcytidine-3'-phosphate
  modified_base 5: mod_base = OTHER; note = 2'-O-methyluridine-3'-phosphate
  modified_base 6: mod_base = OTHER; note = 2'-deoxy-2'-fluoroguanosine-3'-phosphate
  modified_base 7: mod_base = OTHER; note = 2'-O-methyluridine-3'-phosphate
  modified_base 8: mod_base = OTHER; note = 2'-deoxy-2'-fluorouridine-3'-phosphate
  modified_base 9: mod_base = OTHER; note = 2'-deoxy-2'-fluoroguanosine-3'-phosphate
  modified_base 10: mod_base = OTHER; note = 2'-O-methylcytidine-3'-phosphate
  modified_base 11: mod_base = OTHER; note = 2'-O-methylguanosine-3'-phosphate
  modified_base 12: mod_base = OTHER; note = 2'-O-methylguanosine-3'-phosphate
  modified_base 13: mod_base = OTHER; note = 2'-O-methyluridine-3'-phosphate
  modified_base 14: mod_base = OTHER; note = 2'-deoxy-2'-fluorocytidine-3'-phosphate
  modified_base 15: mod_base = OTHER; note = 2'-O-methylcytidine-3'-phosphate
  modified_base 16: mod_base = OTHER; note = 2'-deoxy-2'-fluoroadenosine-3'-phosphate
  modified_base 17: mod_base = OTHER; note = 2'-O-methylcytidine-3'-phosphate
  modified_base 18: mod_base = OTHER; note = 2'-O-methylguanosine-3'-phosphate
  modified_base 19: mod_base = OTHER; note = 2'-O-methyluridine-3'-phosphate
  modified_base 20: mod_base = OTHER; note = 2'-O-methyladenosine-3'-phosphate
  modified_base 21: mod_base = OTHER; note = 2'-O-methylguanosine-3'-phosphorothioate
  modified_base 22: mod_base = OTHER; note = 2'-O-methylguanosine-3'-phosphorothioate
  modified_base 23: mod_base = OTHER; note = 2'-O-methylguanosine
aagctgttgcggtccacgtaggg

SEQ ID NO: 363 - RNA, 23 nt, synthetic construct
  source 1..23: mol_type = other RNA
  modified_base 1: mod_base = OTHER; note = 2'-O-methyladenosine-3'-phosphorothioate
  modified_base 2: mod_base = OTHER; note = 2'-deoxy-2'-fluoroadenosine-3'-phosphorothioate
  modified_base 3: mod_base = OTHER; note = 2'-O-methylcytidine-3'-phosphate
  modified_base 4: mod_base = OTHER; note = 2'-O-methyladenosine-3'-phosphate
  modified_base 5: mod_base = OTHER; note = 2'-O-methylguanosine-3'-phosphate
  modified_base 6: mod_base = OTHER; note = 2'-deoxy-2'-fluorocytidine-3'-phosphate
  modified_base 7: mod_base = OTHER; note = 2'-O-methyluridine-3'-phosphate
  modified_base 8: mod_base = OTHER; note = 2'-deoxy-2'-fluorouridine-3'-phosphate
  modified_base 9: mod_base = OTHER; note = 2'-deoxy-2'-fluoroguanosine-3'-phosphate
  modified_base 10: mod_base = OTHER; note = 2'-O-methylcytidine-3'-phosphate
  modified_base 11: mod_base = OTHER; note = 2'-O-methyladenosine-3'-phosphate
  modified_base 12: mod_base = OTHER; note = 2'-O-methylguanosine-3'-phosphate
  modified_base 13: mod_base = OTHER; note = 2'-O-methylcytidine-3'-phosphate
  modified_base 14: mod_base = OTHER; note = 2'-deoxy-2'-fluorouridine-3'-phosphate
  modified_base 15: mod_base = OTHER; note = 2'-O-methylguanosine-3'-phosphate
  modified_base 16: mod_base = OTHER; note = 2'-deoxy-2'-fluorouridine-3'-phosphate
  modified_base 17: mod_base = OTHER; note = 2'-O-methyluridine-3'-phosphate
  modified_base 18: mod_base = OTHER; note = 2'-O-methylguanosine-3'-phosphate
  modified_base 19: mod_base = OTHER; note = 2'-O-methylcytidine-3'-phosphate
  modified_base 20: mod_base = OTHER; note = 2'-O-methylguanosine-3'-phosphate
  modified_base 21: mod_base = OTHER; note = 2'-O-methylguanosine-3'-phosphorothioate
  modified_base 22: mod_base = OTHER; note = 2'-O-methyluridine-3'-phosphorothioate
  modified_base 23: mod_base = OTHER; note = 2'-O-methylcytidine
aacagcttgcagctgttgcggtc

SEQ ID NO: 364 - RNA, 23 nt, synthetic construct
  source 1..23: mol_type = other RNA
  modified_base 1: mod_base = OTHER; note = 2'-O-methyladenosine-3'-phosphorothioate
  modified_base 2: mod_base = OTHER; note = 2'-deoxy-2'-fluoroadenosine-3'-phosphorothioate
  modified_base 3: mod_base = OTHER; note = 2'-O-methylguanosine-3'-phosphate
  modified_base 4: mod_base = OTHER; note = 2'-O-methylcytidine-3'-phosphate
  modified_base 5: mod_base = OTHER; note = 2'-O-methyluridine-3'-phosphate
  modified_base 6: mod_base = OTHER; note = 2'-deoxy-2'-fluoroguanosine-3'-phosphate
  modified_base 7: mod_base = OTHER; note = 2'-O-methylcytidine-3'-phosphate
  modified_base 8: mod_base = OTHER; note = 2'-deoxy-2'-fluorouridine-3'-phosphate
  modified_base 9: mod_base = OTHER; note = 2'-deoxy-2'-fluoroguanosine-3'-phosphate
  modified_base 10: mod_base = OTHER; note = 2'-O-methylguanosine-3'-phosphate
  modified_base 11: mod_base = OTHER; note = 2'-O-methyladenosine-3'-phosphate
  modified_base 12: mod_base = OTHER; note = 2'-O-methylcytidine-3'-phosphate
  modified_base 13: mod_base = OTHER; note = 2'-O-methyladenosine-3'-phosphate
  modified_base 14: mod_base = OTHER; note = 2'-deoxy-2'-fluoroguanosine-3'-phosphate
  modified_base 15: mod_base = OTHER; note = 2'-O-methylcytidine-3'-phosphate
  modified_base 16: mod_base = OTHER; note = 2'-deoxy-2'-fluorouridine-3'-phosphate
  modified_base 17: mod_base = OTHER; note = 2'-O-methyluridine-3'-phosphate
  modified_base 18: mod_base = OTHER; note = 2'-O-methylguanosine-3'-phosphate
  modified_base 19: mod_base = OTHER; note = 2'-O-methylcytidine-3'-phosphate
  modified_base 20: mod_base = OTHER; note = 2'-O-methyladenosine-3'-phosphate
  modified_base 21: mod_base = OTHER; note = 2'-O-methylguanosine-3'-phosphorothioate
  modified_base 22: mod_base = OTHER; note = 2'-O-methylcytidine-3'-phosphorothioate
  modified_base 23: mod_base = OTHER; note = 2'-O-methyluridine
aagctgctggacagcttgcagct

SEQ ID NO: 365 - RNA, 23 nt, synthetic construct
  source 1..23: mol_type = other RNA
  modified_base 1: mod_base = OTHER; note = 2'-O-methyladenosine-3'-phosphorothioate
  modified_base 2: mod_base = OTHER; note = 2'-deoxy-2'-fluorouridine-3'-phosphorothioate
  modified_base 3: mod_base = OTHER; note = 2'-O-methylguanosine-3'-phosphate
  modified_base 4: mod_base = OTHER; note = 2'-O-methyladenosine-3'-phosphate
  modified_base 5: mod_base = OTHER; note = 2'-O-methyluridine-3'-phosphate
  modified_base 6: mod_base = OTHER; note = 2'-deoxy-2'-fluoroguanosine-3'-phosphate
  modified_base 7: mod_base = OTHER; note = 2'-O-methyladenosine-3'-phosphate
  modified_base 8: mod_base = OTHER; note = 2'-deoxy-2'-fluorouridine-3'-phosphate
  modified_base 9: mod_base = OTHER; note = 2'-deoxy-2'-fluoroguanosine-3'-phosphate
  modified_base 10: mod_base = OTHER; note = 2'-O-methyladenosine-3'-phosphate
  modified_base 11: mod_base = OTHER; note = 2'-O-methyladenosine-3'-phosphate
  modified_base 12: mod_base = OTHER; note = 2'-O-methylguanosine-3'-phosphate
  modified_base 13: mod_base = OTHER; note = 2'-O-methylcytidine-3'-phosphate
  modified_base 14: mod_base = OTHER; note = 2'-deoxy-2'-fluorouridine-3'-phosphate
  modified_base 15: mod_base = OTHER; note = 2'-O-methylguanosine-3'-phosphate
  modified_base 16: mod_base = OTHER; note = 2'-deoxy-2'-fluorocytidine-3'-phosphate
  modified_base 17: mod_base = OTHER; note = 2'-O-methyluridine-3'-phosphate
  modified_base 18: mod_base = OTHER; note = 2'-O-methylguanosine-3'-phosphate
  modified_base 19: mod_base = OTHER; note = 2'-O-methylguanosine-3'-phosphate
  modified_base 20: mod_base = OTHER; note = 2'-O-methyladenosine-3'-phosphate
  modified_base 21: mod_base = OTHER; note = 2'-O-methylcytidine-3'-phosphorothioate
  modified_base 22: mod_base = OTHER; note = 2'-O-methyladenosine-3'-phosphorothioate
  modified_base 23: mod_base = OTHER; note = 2'-O-methylguanosine
atgatgatgaagctgctggacag

SEQ ID NO: 366 - RNA, 23 nt, synthetic construct
  source 1..23: mol_type = other RNA
  modified_base 1: mod_base = OTHER; note = 2'-O-methyladenosine-3'-phosphorothioate
  modified_base 2: mod_base = OTHER; note = 2'-deoxy-2'-fluoroadenosine-3'-phosphorothioate
  modified_base 3: mod_base = OTHER; note = 2'-O-methylguanosine-3'-phosphate
  modified_base 4: mod_base = OTHER; note = 2'-O-methyladenosine-3'-phosphate
  modified_base 5: mod_base = OTHER; note = 2'-O-methyladenosine-3'-phosphate
  modified_base 6: mod_base = OTHER; note = 2'-deoxy-2'-fluorocytidine-3'-phosphate
  modified_base 7: mod_base = OTHER; note = 2'-O-methyladenosine-3'-phosphate
  modified_base 8: mod_base = OTHER; note = 2'-deoxy-2'-fluorouridine-3'-phosphate
  modified_base 9: mod_base = OTHER; note = 2'-deoxy-2'-fluoroguanosine-3'-phosphate
  modified_base 10: mod_base = OTHER; note = 2'-O-methyluridine-3'-phosphate
  modified_base 11: mod_base = OTHER; note = 2'-O-methyluridine-3'-phosphate
  modified_base 12: mod_base = OTHER; note = 2'-O-methylcytidine-3'-phosphate
  modified_base 13: mod_base = OTHER; note = 2'-O-methyluridine-3'-phosphate
  modified_base 14: mod_base = OTHER; note = 2'-deoxy-2'-fluoroguanosine-3'-phosphate
  modified_base 15: mod_base = OTHER; note = 2'-O-methylguanosine-3'-phosphate
  modified_base 16: mod_base = OTHER; note = 2'-deoxy-2'-fluoroguanosine-3'-phosphate
  modified_base 17: mod_base = OTHER; note = 2'-O-methyluridine-3'-phosphate
  modified_base 18: mod_base = OTHER; note = 2'-O-methylguanosine-3'-phosphate
  modified_base 19: mod_base = OTHER; note = 2'-O-methyladenosine-3'-phosphate
  modified_base 20: mod_base = OTHER; note = 2'-O-methyluridine-3'-phosphate
  modified_base 21: mod_base = OTHER; note = 2'-O-methylguanosine-3'-phosphorothioate
  modified_base 22: mod_base = OTHER; note = 2'-O-methyladenosine-3'-phosphorothioate
  modified_base 23: mod_base = OTHER; note = 2'-O-methyluridine
aagaacatgttctgggtgatgat

SEQ ID NO: 367 - RNA, 23 nt, synthetic construct
  source 1..23: mol_type = other RNA
  modified_base 1: mod_base = OTHER; note = 2'-O-methyladenosine-3'-phosphorothioate
  modified_base 2: mod_base = OTHER; note = 2'-deoxy-2'-fluoroadenosine-3'-phosphorothioate
  modified_base 3: mod_base = OTHER; note = 2'-O-methylguanosine-3'-phosphate
  modified_base 4: mod_base = OTHER; note = 2'-O-methylcytidine-3'-phosphate
  modified_base 5: mod_base = OTHER; note = 2'-O-methylcytidine-3'-phosphate
  modified_base 6: mod_base = OTHER; note = 2'-deoxy-2'-fluoroguanosine-3'-phosphate
  modified_base 7: mod_base = OTHER; note = 2'-O-methylguanosine-3'-phosphate
  modified_base 8: mod_base = OTHER; note = 2'-deoxy-2'-fluorocytidine-3'-phosphate
  modified_base 9: mod_base = OTHER; note = 2'-deoxy-2'-fluoroadenosine-3'-phosphate
  modified_base 10: mod_base = OTHER; note = 2'-O-methylcytidine-3'-phosphate
  modified_base 11: mod_base = OTHER; note = 2'-O-methyladenosine-3'-phosphate
  modified_base 12: mod_base = OTHER; note = 2'-O-methylguanosine-3'-phosphate
  modified_base 13: mod_base = OTHER; note = 2'-O-methyladenosine-3'-phosphate
  modified_base 14: mod_base = OTHER; note = 2'-deoxy-2'-fluoroadenosine-3'-phosphate
  modified_base 15: mod_base = OTHER; note = 2'-O-methylcytidine-3'-phosphate
  modified_base 16: mod_base = OTHER; note = 2'-deoxy-2'-fluoroadenosine-3'-phosphate
  modified_base 17: mod_base = OTHER; note = 2'-O-methyluridine-3'-phosphate
  modified_base 18: mod_base = OTHER; note = 2'-O-methylguanosine-3'-phosphate
  modified_base 19: mod_base = OTHER; note = 2'-O-methyluridine-3'-phosphate
  modified_base 20: mod_base = OTHER; note = 2'-O-methyluridine-3'-phosphate
  modified_base 21: mod_base = OTHER; note = 2'-O-methylcytidine-3'-phosphorothioate
  modified_base 22: mod_base = OTHER; note = 2'-O-methyluridine-3'-phosphorothioate
  modified_base 23: mod_base = OTHER; note = 2'-O-methylguanosine
aagccggcacagaacatgttctg

SEQ ID NO: 368 - RNA, 23 nt, synthetic construct
  source 1..23: mol_type = other RNA
  modified_base 1: mod_base = OTHER; note = 2'-O-methyladenosine-3'-phosphorothioate
  modified_base 2: mod_base = OTHER; note = 2'-deoxy-2'-fluorocytidine-3'-phosphorothioate
  modified_base 3: mod_base = OTHER; note = 2'-O-methyluridine-3'-phosphate
  modified_base 4: mod_base = OTHER; note = 2'-O-methylguanosine-3'-phosphate
  modified_base 5: mod_base = OTHER; note = 2'-O-methylcytidine-3'-phosphate
  modified_base 6: mod_base = OTHER; note = 2'-deoxy-2'-fluorouridine-3'-phosphate
  modified_base 7: mod_base = OTHER; note = 2'-O-methyluridine-3'-phosphate
  modified_base 8: mod_base = OTHER; note = 2'-deoxy-2'-fluoroguanosine-3'-phosphate
  modified_base 9: mod_base = OTHER; note = 2'-deoxy-2'-fluoroguanosine-3'-phosphate
  modified_base 10: mod_base = OTHER; note = 2'-O-methyluridine-3'-phosphate
  modified_base 11: mod_base = OTHER; note = 2'-O-methylguanosine-3'-phosphate
  modified_base 12: mod_base = OTHER; note = 2'-O-methyluridine-3'-phosphate
  modified_base 13: mod_base = OTHER; note = 2'-O-methylcytidine-3'-phosphate
  modified_base 14: mod_base = OTHER; note = 2'-deoxy-2'-fluoroguanosine-3'-phosphate
  modified_base 15: mod_base = OTHER; note = 2'-O-methyluridine-3'-phosphate
  modified_base 16: mod_base = OTHER; note = 2'-deoxy-2'-fluoroadenosine-3'-phosphate
  modified_base 17: mod_base = OTHER; note = 2'-O-methylguanosine-3'-phosphate
  modified_base 18: mod_base = OTHER; note = 2'-O-methylcytidine-3'-phosphate
  modified_base 19: mod_base = OTHER; note = 2'-O-methylcytidine-3'-phosphate
  modified_base 20: mod_base = OTHER; note = 2'-O-methylguanosine-3'-phosphate
  modified_base 21: mod_base = OTHER; note = 2'-O-methylguanosine-3'-phosphorothioate
  modified_base 22: mod_base = OTHER; note = 2'-O-methylcytidine-3'-phosphorothioate
  modified_base 23: mod_base = OTHER; note = 2'-O-methyladenosine
actgcttggtgtcgtagccggca

SEQ ID NO: 369 - RNA, 23 nt, synthetic construct
  source 1..23: mol_type = other RNA
  modified_base 1: mod_base = OTHER; note = 2'-O-methyladenosine-3'-phosphorothioate
  modified_base 2: mod_base = OTHER; note = 2'-deoxy-2'-fluoroadenosine-3'-phosphorothioate
  modified_base 3: mod_base = OTHER; note = 2'-O-methylguanosine-3'-phosphate
  modified_base 4: mod_base = OTHER; note = 2'-O-methylguanosine-3'-phosphate
  modified_base 5: mod_base = OTHER; note = 2'-O-methylcytidine-3'-phosphate
  modified_base 6: mod_base = OTHER; note = 2'-deoxy-2'-fluoroadenosine-3'-phosphate
  modified_base 7: mod_base = OTHER; note = 2'-O-methyluridine-3'-phosphate
  modified_base 8: mod_base = OTHER; note = 2'-deoxy-2'-fluorocytidine-3'-phosphate
  modified_base 9: mod_base = OTHER; note = 2'-deoxy-2'-fluorocytidine-3'-phosphate
  modified_base 10: mod_base = OTHER; note = 2'-O-methyluridine-3'-phosphate
  modified_base 11: mod_base = OTHER; note = 2'-O-methylcytidine-3'-phosphate
  modified_base 12: mod_base = OTHER; note = 2'-O-methylcytidine-3'-phosphate
  modified_base 13: mod_base = OTHER; note = 2'-O-methyluridine-3'-phosphate
  modified_base 14: mod_base = OTHER; note = 2'-deoxy-2'-fluoroguanosine-3'-phosphate
  modified_base 15: mod_base = OTHER; note = 2'-O-methylcytidine-3'-phosphate
  modified_base 16: mod_base = OTHER; note = 2'-deoxy-2'-fluorouridine-3'-phosphate
  modified_base 17: mod_base = OTHER; note = 2'-O-methyluridine-3'-phosphate
  modified_base 18: mod_base = OTHER; note = 2'-O-methylguanosine-3'-phosphate
  modified_base 19: mod_base = OTHER; note = 2'-O-methylguanosine-3'-phosphate
  modified_base 20: mod_base = OTHER; note = 2'-O-methyluridine-3'-phosphate
  modified_base 21: mod_base = OTHER; note = 2'-O-methylguanosine-3'-phosphorothioate
  modified_base 22: mod_base = OTHER; note = 2'-O-methyluridine-3'-phosphorothioate
  modified_base 23: mod_base = OTHER; note = 2'-O-methylcytidine
aaggcatcctcctgcttggtgtc

SEQ ID NO: 370 - RNA, 23 nt, synthetic construct
  source 1..23: mol_type = other RNA
  modified_base 1: mod_base = OTHER; note = 2'-O-methyladenosine-3'-phosphorothioate
  modified_base 2: mod_base = OTHER; note = 2'-deoxy-2'-fluoroadenosine-3'-phosphorothioate
  modified_base 3: mod_base = OTHER; note = 2'-O-methylguanosine-3'-phosphate
  modified_base 4: mod_base = OTHER; note = 2'-O-methyluridine-3'-phosphate
  modified_base 5: mod_base = OTHER; note = 2'-O-methyladenosine-3'-phosphate
  modified_base 6: mod_base = OTHER; note = 2'-deoxy-2'-fluoroguanosine-3'-phosphate
  modified_base 7: mod_base = OTHER; note = 2'-O-methylguanosine-3'-phosphate
  modified_base 8: mod_base = OTHER; note = 2'-deoxy-2'-fluorouridine-3'-phosphate
  modified_base 9: mod_base = OTHER; note = 2'-deoxy-2'-fluoroguanosine-3'-phosphate
  modified_base 10: mod_base = OTHER; note = 2'-O-methyluridine-3'-phosphate
  modified_base 11: mod_base = OTHER; note = 2'-O-methylcytidine-3'-phosphate
  modified_base 12: mod_base = OTHER; note = 2'-O-methylcytidine-3'-phosphate
  modified_base 13: mod_base = OTHER; note = 2'-O-methyluridine-3'-phosphate
  modified_base 14: mod_base = OTHER; note = 2'-deoxy-2'-fluorouridine-3'-phosphate
  modified_base 15: mod_base = OTHER; note = 2'-O-methylguanosine-3'-phosphate
  modified_base 16: mod_base = OTHER; note = 2'-deoxy-2'-fluoroadenosine-3'-phosphate
  modified_base 17: mod_base = OTHER; note = 2'-O-methyladenosine-3'-phosphate
  modified_base 18: mod_base = OTHER; note = 2'-O-methylguanosine-3'-phosphate
  modified_base 19: mod_base = OTHER; note = 2'-O-methylcytidine-3'-phosphate
  modified_base 20: mod_base = OTHER; note = 2'-O-methylguanosine-3'-phosphate
  modified_base 21: mod_base = OTHER; note = 2'-O-methylguanosine-3'-phosphorothioate
  modified_base 22: mod_base = OTHER; note = 2'-O-methylguanosine-3'-phosphorothioate
  modified_base 23: mod_base = OTHER; note = 2'-O-methyluridine
aagtaggtgtccttgaagcgggt

SEQ ID NO: 371 - RNA, 23 nt, synthetic construct
  source 1..23: mol_type = other RNA
  modified_base 1: mod_base = OTHER; note = 2'-O-methyladenosine-3'-phosphorothioate
  modified_base 2: mod_base = OTHER; note = 2'-deoxy-2'-fluorocytidine-3'-phosphorothioate
  modified_base 3: mod_base = OTHER; note = 2'-O-methyluridine-3'-phosphate
  modified_base 4: mod_base = OTHER; note = 2'-O-methylguanosine-3'-phosphate
  modified_base 5: mod_base = OTHER; note = 2'-O-methyluridine-3'-phosphate
  modified_base 6: mod_base = OTHER; note = 2'-deoxy-2'-fluorocytidine-3'-phosphate
  modified_base 7: mod_base = OTHER; note = 2'-O-methyladenosine-3'-phosphate
  modified_base 8: mod_base = OTHER; note = 2'-deoxy-2'-fluorocytidine-3'-phosphate
  modified_base 9: mod_base = OTHER; note = 2'-deoxy-2'-fluoroguanosine-3'-phosphate
  modified_base 10: mod_base = OTHER; note = 2'-O-methyladenosine-3'-phosphate
  modified_base 11: mod_base = OTHER; note = 2'-O-methyladenosine-3'-phosphate
  modified_base 12: mod_base = OTHER; note = 2'-O-methylguanosine-3'-phosphate
  modified_base 13: mod_base = OTHER; note = 2'-O-methyluridine-3'-phosphate
  modified_base 14: mod_base = OTHER; note = 2'-deoxy-2'-fluoroadenosine-3'-phosphate
  modified_base 15: mod_base = OTHER; note = 2'-O-methylguanosine-3'-phosphate
  modified_base 16: mod_base = OTHER; note = 2'-deoxy-2'-fluoroguanosine-3'-phosphate
  modified_base 17: mod_base = OTHER; note = 2'-O-methyluridine-3'-phosphate
  modified_base 18: mod_base = OTHER; note = 2'-O-methylguanosine-3'-phosphate
  modified_base 19: mod_base = OTHER; note = 2'-O-methyluridine-3'-phosphate
  modified_base 20: mod_base = OTHER; note = 2'-O-methylcytidine-3'-phosphate
  modified_base 21: mod_base = OTHER; note = 2'-O-methylcytidine-3'-phosphorothioate
  modified_base 22: mod_base = OTHER; note = 2'-O-methyluridine-3'-phosphorothioate
  modified_base 23: mod_base = OTHER; note = 2'-O-methyluridine
actgtcacgaagtaggtgtcctt

SEQ ID NO: 372 - RNA, 23 nt, synthetic construct
  source 1..23: mol_type = other RNA
  modified_base 1: mod_base = OTHER; note = 2'-O-methyladenosine-3'-phosphorothioate
  modified_base 2: mod_base = OTHER; note = 2'-deoxy-2'-fluoroadenosine-3'-phosphorothioate
  modified_base 3: mod_base = OTHER; note = 2'-O-methylguanosine-3'-phosphate
  modified_base 4: mod_base = OTHER; note = 2'-O-methylcytidine-3'-phosphate
  modified_base 5: mod_base = OTHER; note = 2'-O-methyluridine-3'-phosphate
  modified_base 6: mod_base = OTHER; note = 2'-deoxy-2'-fluoroguanosine-3'-phosphate
  modified_base 7: mod_base = OTHER; note = 2'-O-methyladenosine-3'-phosphate
  modified_base 8: mod_base = OTHER; note = 2'-deoxy-2'-fluorocytidine-3'-phosphate
  modified_base 9: mod_base = OTHER; note = 2'-deoxy-2'-fluoroguanosine-3'-phosphate
  modified_base 10: mod_base = OTHER; note = 2'-O-methyladenosine-3'-phosphate
  modified_base 11: mod_base = OTHER; note = 2'-O-methyluridine-3'-phosphate
  modified_base 12: mod_base = OTHER; note = 2'-O-methylguanosine-3'-phosphate
  modified_base 13: mod_base = OTHER; note = 2'-O-methylcytidine-3'-phosphate
  modified_base 14: mod_base = OTHER; note = 2'-deoxy-2'-fluorocytidine-3'-phosphate
  modified_base 15: mod_base = OTHER; note = 2'-O-methyluridine-3'-phosphate
  modified_base 16: mod_base = OTHER; note = 2'-deoxy-2'-fluoroguanosine-3'-phosphate
  modified_base 17: mod_base = OTHER; note = 2'-O-methyluridine-3'-phosphate
  modified_base 18: mod_base = OTHER; note = 2'-O-methylcytidine-3'-phosphate
  modified_base 19: mod_base = OTHER; note = 2'-O-methyladenosine-3'-phosphate
  modified_base 20: mod_base = OTHER; note = 2'-O-methylcytidine-3'-phosphate
  modified_base 21: mod_base = OTHER; note = 2'-O-methylguanosine-3'-phosphorothioate
  modified_base 22: mod_base = OTHER; note = 2'-O-methyladenosine-3'-phosphorothioate
  modified_base 23: mod_base = OTHER; note = 2'-O-methyladenosine
aagctgacgatgcctgtcacgaa

SEQ ID NO: 373 - RNA, 23 nt, synthetic construct
  source 1..23: mol_type = other RNA
  modified_base 1: mod_base = OTHER; note = 2'-O-methyladenosine-3'-phosphorothioate
  modified_base 2: mod_base = OTHER; note = 2'-deoxy-2'-fluoroadenosine-3'-phosphorothioate
  modified_base 3: mod_base = OTHER; note = 2'-O-methylcytidine-3'-phosphate
  modified_base 4: mod_base = OTHER; note = 2'-O-methylcytidine-3'-phosphate
  modified_base 5: mod_base = OTHER; note = 2'-O-methyluridine-3'-phosphate
  modified_base 6: mod_base = OTHER; note = 2'-deoxy-2'-fluorouridine-3'-phosphate
  modified_base 7: mod_base = OTHER; note = 2'-O-methylguanosine-3'-phosphate
  modified_base 8: mod_base = OTHER; note = 2'-deoxy-2'-fluoroguanosine-3'-phosphate
  modified_base 9: mod_base = OTHER; note = 2'-deoxy-2'-fluorouridine-3'-phosphate
  modified_base 10: mod_base = OTHER; note = 2'-O-methylguanosine-3'-phosphate
  modified_base 11: mod_base = OTHER; note = 2'-O-methyluridine-3'-phosphate
  modified_base 12: mod_base = OTHER; note = 2'-O-methyladenosine-3'-phosphate
  modified_base 13: mod_base = OTHER; note = 2'-O-methylguanosine-3'-phosphate
  modified_base 14: mod_base = OTHER; note = 2'-deoxy-2'-fluoroadenosine-3'-phosphate
  modified_base 15: mod_base = OTHER; note = 2'-O-methyluridine-3'-phosphate
  modified_base 16: mod_base = OTHER; note = 2'-deoxy-2'-fluorocytidine-3'-phosphate
  modified_base 17: mod_base = OTHER; note = 2'-O-methylcytidine-3'-phosphate
  modified_base 18: mod_base = OTHER; note = 2'-O-methylcytidine-3'-phosphate
  modified_base 19: mod_base = OTHER; note = 2'-O-methylguanosine-3'-phosphate
  modified_base 20: mod_base = OTHER; note = 2'-O-methyluridine-3'-phosphate
  modified_base 21: mod_base = OTHER; note = 2'-O-methyladenosine-3'-phosphorothioate
  modified_base 22: mod_base = OTHER; note = 2'-O-methylcytidine-3'-phosphorothioate
  modified_base 23: mod_base = OTHER; note = 2'-O-methyluridine
aaccttggtgtagatcccgtact

SEQ ID NO: 374 - RNA, 23 nt, synthetic construct
  source 1..23: mol_type = other RNA
  modified_base 1: mod_base = OTHER; note = 2'-O-methyladenosine-3'-phosphorothioate
  modified_base 2: mod_base = OTHER; note = 2'-deoxy-2'-fluoroadenosine-3'-phosphorothioate
  modified_base 3: mod_base = OTHER; note = 2'-O-methyladenosine-3'-phosphate
  modified_base 4: mod_base = OTHER; note = 2'-O-methylguanosine-3'-phosphate
  modified_base 5: mod_base = OTHER; note = 2'-O-methylguanosine-3'-phosphate
  modified_base 6: mod_base = OTHER; note = 2'-deoxy-2'-fluorocytidine-3'-phosphate
  modified_base 7: mod_base = OTHER; note = 2'-O-methylguanosine-3'-phosphate
  modified_base 8: mod_base = OTHER; note = 2'-deoxy-2'-fluoroguanosine-3'-phosphate
  modified_base 9: mod_base = OTHER; note = 2'-deoxy-2'-fluorouridine-3'-phosphate
  modified_base 10: mod_base = OTHER; note = 2'-O-methylguanosine-3'-phosphate
  modified_base 11: mod_base = OTHER; note = 2'-O-methyladenosine-3'-phosphate
  modified_base 12: mod_base = OTHER; note = 2'-O-methylcytidine-3'-phosphate
  modified_base 13: mod_base = OTHER; note = 2'-O-methylcytidine-3'-phosphate
  modified_base 14: mod_base = OTHER; note = 2'-deoxy-2'-fluorouridine-3'-phosphate
  modified_base 15: mod_base = OTHER; note = 2'-O-methyluridine-3'-phosphate
  modified_base 16: mod_base = OTHER; note = 2'-deoxy-2'-fluoroguanosine-3'-phosphate
  modified_base 17: mod_base = OTHER; note = 2'-O-methylguanosine-3'-phosphate
  modified_base 18: mod_base = OTHER; note = 2'-O-methyluridine-3'-phosphate
  modified_base 19: mod_base = OTHER; note = 2'-O-methylguanosine-3'-phosphate
  modified_base 20: mod_base = OTHER; note = 2'-O-methyluridine-3'-phosphate
  modified_base 21: mod_base = OTHER; note = 2'-O-methyladenosine-3'-phosphorothioate
  modified_base 22: mod_base = OTHER; note = 2'-O-methylguanosine-3'-phosphorothioate
  modified_base 23: mod_base = OTHER; note = 2'-O-methyladenosine
aaaggcggtgaccttggtgtaga

SEQ ID NO: 375 - RNA, 23 nt, synthetic construct
  source 1..23: mol_type = other RNA
  modified_base 1: mod_base = OTHER; note = 2'-O-methyladenosine-3'-phosphorothioate
  modified_base 2: mod_base = OTHER; note = 2'-deoxy-2'-fluorocytidine-3'-phosphorothioate
  modified_base 3: mod_base = OTHER; note = 2'-O-methylguanosine-3'-phosphate
  modified_base 4: mod_base = OTHER; note = 2'-O-methyladenosine-3'-phosphate
  modified_base 5: mod_base = OTHER; note = 2'-O-methyluridine-3'-phosphate
  modified_base 6: mod_base = OTHER; note = 2'-deoxy-2'-fluorocytidine-3'-phosphate
  modified_base 7: mod_base = OTHER; note = 2'-O-methylcytidine-3'-phosphate
  modified_base 8: mod_base = OTHER; note = 2'-deoxy-2'-fluoroadenosine-3'-phosphate
  modified_base 9: mod_base = OTHER; note = 2'-deoxy-2'-fluorocytidine-3'-phosphate
  modified_base 10: mod_base = OTHER; note = 2'-O-methyluridine-3'-phosphate
  modified_base 11: mod_base = OTHER; note = 2'-O-methyluridine-3'-phosphate
  modified_base 12: mod_base = OTHER; note = 2'-O-methylguanosine-3'-phosphate
  modified_base 13: mod_base = OTHER; note = 2'-O-methyladenosine-3'-phosphate
  modified_base 14: mod_base = OTHER; note = 2'-deoxy-2'-fluoroguanosine-3'-phosphate
  modified_base 15: mod_base = OTHER; note = 2'-O-methylguanosine-3'-phosphate
  modified_base 16: mod_base = OTHER; note = 2'-deoxy-2'-fluoroadenosine-3'-phosphate
  modified_base 17: mod_base = OTHER; note = 2'-O-methyladenosine-3'-phosphate
  modified_base 18: mod_base = OTHER; note = 2'-O-methylguanosine-3'-phosphate
  modified_base 19: mod_base = OTHER; note = 2'-O-methylguanosine-3'-phosphate
  modified_base 20: mod_base = OTHER; note = 2'-O-methylcytidine-3'-phosphate
  modified_base 21: mod_base = OTHER; note = 2'-O-methylguanosine-3'-phosphorothioate
  modified_base 22: mod_base = OTHER; note = 2'-O-methylguanosine-3'-phosphorothioate
  modified_base 23: mod_base = OTHER; note = 2'-O-methyluridine
acgatccacttgaggaaggcggt

SEQ ID NO: 376 - RNA, 23 nt, synthetic construct
  source 1..23: mol_type = other RNA
  modified_base 1: mod_base = OTHER; note = 2'-O-methyladenosine-3'-phosphorothioate
  modified_base 2: mod_base = OTHER; note = 2'-deoxy-2'-fluorouridine-3'-phosphorothioate
  modified_base 3: mod_base = OTHER; note = 2'-O-methylguanosine-3'-phosphate
  modified_base 4: mod_base = OTHER; note = 2'-O-methylguanosine-3'-phosphate
  modified_base 5: mod_base = OTHER; note = 2'-O-methyladenosine-3'-phosphate
  modified_base 6: mod_base = OTHER; note = 2'-deoxy-2'-fluorocytidine-3'-phosphate
  modified_base 7: mod_base = OTHER; note = 2'-O-methylcytidine-3'-phosphate
  modified_base 8: mod_base = OTHER; note = 2'-deoxy-2'-fluorouridine-3'-phosphate
  modified_base 9: mod_base = OTHER; note = 2'-deoxy-2'-fluoroguanosine-3'-phosphate
  modified_base 10: mod_base = OTHER; note = 2'-O-methyluridine-3'-phosphate
  modified_base 11: mod_base = OTHER; note = 2'-O-methylcytidine-3'-phosphate
  modified_base 12: mod_base = OTHER; note = 2'-O-methylguanosine-3'-phosphate
  modified_base 13: mod_base = OTHER; note = 2'-O-methyladenosine-3'-phosphate
  modified_base 14: mod_base = OTHER; note = 2'-deoxy-2'-fluorouridine-3'-phosphate
  modified_base 15: mod_base = OTHER; note = 2'-O-methylcytidine-3'-phosphate
  modified_base 16: mod_base = OTHER; note = 2'-deoxy-2'-fluorocytidine-3'-phosphate
  modified_base 17: mod_base = OTHER; note = 2'-O-methyladenosine-3'-phosphate
  modified_base 18: mod_base = OTHER; note = 2'-O-methylcytidine-3'-phosphate
  modified_base 19: mod_base = OTHER; note = 2'-O-methyluridine-3'-phosphate
  modified_base 20: mod_base = OTHER; note = 2'-O-methyluridine-3'-phosphate
  modified_base 21: mod_base = OTHER; note = 2'-O-methylguanosine-3'-phosphorothioate
  modified_base 22: mod_base = OTHER; note = 2'-O-methyladenosine-3'-phosphorothioate
  modified_base 23: mod_base = OTHER; note = 2'-O-methylguanosine
atggacctgtcgatccacttgag

SEQ ID NO: 377 - RNA, 23 nt, synthetic construct
  source 1..23: mol_type = other RNA
  modified_base 1: mod_base = OTHER; note = 2'-O-methyladenosine-3'-phosphorothioate
  modified_base 2: mod_base = OTHER; note = 2'-deoxy-2'-fluorouridine-3'-phosphorothioate
  modified_base 3: mod_base = OTHER; note = 2'-O-methylguanosine-3'-phosphate
  modified_base 4: mod_base = OTHER; note = 2'-O-methylguanosine-3'-phosphate
  modified_base 5: mod_base = OTHER; note = 2'-O-methyluridine-3'-phosphate
  modified_base 6: mod_base = OTHER; note = 2'-deoxy-2'-fluorouridine-3'-phosphate
  modified_base 7: mod_base = OTHER; note = 2'-O-methyluridine-3'-phosphate
  modified_base 8: mod_base = OTHER; note = 2'-deoxy-2'-fluorouridine-3'-phosphate
  modified_base 9: mod_base = OTHER; note = 2'-deoxy-2'-fluorocytidine-3'-phosphate
  modified_base 10: mod_base = OTHER; note = 2'-O-methyladenosine-3'-phosphate
  modified_base 11: mod_base = OTHER; note = 2'-O-methyluridine-3'-phosphate
  modified_base 12: mod_base = OTHER; note = 2'-O-methylguanosine-3'-phosphate
  modified_base 13: mod_base = OTHER; note = 2'-O-methylguanosine-3'-phosphate
  modified_base 14: mod_base = OTHER; note = 2'-deoxy-2'-fluoroadenosine-3'-phosphate
  modified_base 15: mod_base = OTHER; note = 2'-O-methylcytidine-3'-phosphate
  modified_base 16: mod_base = OTHER; note = 2'-deoxy-2'-fluorocytidine-3'-phosphate
  modified_base 17: mod_base = OTHER; note = 2'-O-methyluridine-3'-phosphate
  modified_base 18: mod_base = OTHER; note = 2'-O-methylguanosine-3'-phosphate
  modified_base 19: mod_base = OTHER; note = 2'-O-methyluridine-3'-phosphate
  modified_base 20: mod_base = OTHER; note = 2'-O-methylcytidine-3'-phosphate
  modified_base 21: mod_base = OTHER; note = 2'-O-methylguanosine-3'-phosphorothioate
  modified_base 22: mod_base = OTHER; note = 2'-O-methyladenosine-3'-phosphorothioate
  modified_base 23: mod_base = OTHER; note = 2'-O-methyluridine
atggttttcatggacctgtcgat

SEQ ID NO: 378 - RNA, 23 nt, synthetic construct
  source 1..23: mol_type = other RNA
  modified_base 1: mod_base = OTHER; note = 2'-O-methyladenosine-3'-phosphorothioate
  modified_base 2: mod_base = OTHER; note = 2'-deoxy-2'-fluorouridine-3'-phosphorothioate
  modified_base 3: mod_base = OTHER; note = 2'-O-methylguanosine-3'-phosphate
  modified_base 4: mod_base = OTHER; note = 2'-O-methylguanosine-3'-phosphate
  modified_base 5: mod_base = OTHER; note = 2'-O-methylcytidine-3'-phosphate
  modified_base 6: mod_base = OTHER; note = 2'-deoxy-2'-fluorouridine-3'-phosphate
  modified_base 7: mod_base = OTHER; note = 2'-O-methylcytidine-3'-phosphate
  modified_base 8: mod_base = OTHER; note = 2'-deoxy-2'-fluorouridine-3'-phosphate
  modified_base 9: mod_base = OTHER; note = 2'-deoxy-2'-fluorouridine-3'-phosphate
  modified_base 10: mod_base = OTHER; note = 2'-O-methylguanosine-3'-phosphate
  modified_base 11: mod_base = OTHER; note = 2'-O-methylguanosine-3'-phosphate
  modified_base 12: mod_base = OTHER; note = 2'-O-methylcytidine-3'-phosphate
  modified_base 13: mod_base = OTHER; note = 2'-O-methylcytidine-3'-phosphate
  modified_base 14: mod_base = OTHER; note = 2'-deoxy-2'-fluorouridine-3'-phosphate
  modified_base 15: mod_base = OTHER; note = 2'-O-methyluridine-3'-phosphate
  modified_base 16: mod_base = OTHER; note = 2'-deoxy-2'-fluoroguanosine-3'-phosphate
  modified_base 17: mod_base = OTHER; note = 2'-O-methylguanosine-3'-phosphate
  modified_base 18: mod_base = OTHER; note = 2'-O-methylguanosine-3'-phosphate
  modified_base 19: mod_base = OTHER; note = 2'-O-methylcytidine-3'-phosphate
  modified_base 20: mod_base = OTHER; note = 2'-O-methyladenosine-3'-phosphate
  modified_base 21: mod_base = OTHER; note = 2'-O-methyladenosine-3'-phosphorothioate
  modified_base 22: mod_base = OTHER; note = 2'-O-methylguanosine-3'-phosphorothioate
  modified_base 23: mod_base = OTHER; note = 2'-O-methylcytidine
atggctcttggccttgggcaagc

SEQ ID NO: 379 - RNA, 23 nt, synthetic construct
  source 1..23: mol_type = other RNA
  modified_base 1: mod_base = OTHER; note = 2'-O-methyladenosine-3'-phosphorothioate
  modified_base 2: mod_base = OTHER; note = 2'-deoxy-2'-fluorouridine-3'-phosphorothioate
  modified_base 3: mod_base = OTHER; note = 2'-O-methyladenosine-3'-phosphate
  modified_base 4: mod_base = OTHER; note = 2'-O-methyladenosine-3'-phosphate
  modified_base 5: mod_base = OTHER; note = 2'-O-methyluridine-3'-phosphate
  modified_base 6: mod_base = OTHER; note = 2'-deoxy-2'-fluoroguanosine-3'-phosphate
  modified_base 7: mod_base = OTHER; note = 2'-O-methylguanosine-3'-phosphate
  modified_base 8: mod_base = OTHER; note = 2'-deoxy-2'-fluoroadenosine-3'-phosphate
  modified_base 9: mod_base = OTHER; note = 2'-deoxy-2'-fluoroguanosine-3'-phosphate
  modified_base 10: mod_base = OTHER; note = 2'-O-methyladenosine-3'-phosphate
  modified_base 11: mod_base = OTHER; note = 2'-O-methylguanosine-3'-phosphate
  modified_base 12: mod_base = OTHER; note = 2'-O-methylguanosine-3'-phosphate
  modified_base 13: mod_base = OTHER; note = 2'-O-methyladenosine-3'-phosphate
  modified_base 14: mod_base = OTHER; note = 2'-deoxy-2'-fluorocytidine-3'-phosphate
  modified_base 15: mod_base = OTHER; note = 2'-O-methylguanosine-3'-phosphate
  modified_base 16: mod_base = OTHER; note = 2'-deoxy-2'-fluorouridine-3'-phosphate
  modified_base 17: mod_base = OTHER; note = 2'-O-methyluridine-3'-phosphate
  modified_base 18: mod_base = OTHER; note = 2'-O-methyladenosine-3'-phosphate
  modified_base 19: mod_base = OTHER; note = 2'-O-methyluridine-3'-phosphate
  modified_base 20: mod_base = OTHER; note = 2'-O-methylguanosine-3'-phosphate
  modified_base 21: mod_base = OTHER; note = 2'-O-methyladenosine-3'-phosphorothioate
  modified_base 22: mod_base = OTHER; note = 2'-O-methylcytidine-3'-phosphorothioate
  modified_base 23: mod_base = OTHER; note = 2'-O-methylcytidine
ataatggagaggacgttatgacc

SEQ ID NO: 380 - RNA, 23 nt, synthetic construct
  source 1..23: mol_type = other RNA
  modified_base 1: mod_base = OTHER; note = 2'-O-methyladenosine-3'-phosphorothioate
  modified_base 2: mod_base = OTHER; note = 2'-deoxy-2'-fluoroadenosine-3'-phosphorothioate
  modified_base 3: mod_base = OTHER; note = 2'-O-methyluridine-3'-phosphate
  modified_base 4: mod_base = OTHER; note = 2'-O-methylcytidine-3'-phosphate
  modified_base 5: mod_base = OTHER; note = 2'-O-methyluridine-3'-phosphate
  modified_base 6: mod_base = OTHER; note = 2'-deoxy-2'-fluorocytidine-3'-phosphate
  modified_base 7: mod_base = OTHER; note = 2'-O-methyladenosine-3'-phosphate
  modified_base 8: mod_base = OTHER; note = 2'-deoxy-2'-fluorocytidine-3'-phosphate
  modified_base 9: mod_base = OTHER; note = 2'-deoxy-2'-fluorouridine-3'-phosphate
  modified_base 10: mod_base = OTHER; note = 2'-O-methyluridine-3'-phosphate
  modified_base 11: mod_base = OTHER; note = 2'-O-methyluridine-3'-phosphate
  modified_base 12: mod_base = OTHER; note = 2'-O-methyladenosine-3'-phosphate
  modified_base 13: mod_base = OTHER; note = 2'-O-methyladenosine-3'-phosphate
  modified_base 14: mod_base = OTHER; note = 2'-deoxy-2'-fluorouridine-3'-phosphate
  modified_base 15: mod_base = OTHER; note = 2'-O-methylguanosine-3'-phosphate
  modified_base 16: mod_base = OTHER; note = 2'-deoxy-2'-fluoroguanosine-3'-phosphate
  modified_base 17: mod_base = OTHER; note = 2'-O-methyladenosine-3'-phosphate
  modified_base 18: mod_base = OTHER; note = 2'-O-methylguanosine-3'-phosphate
  modified_base 19: mod_base = OTHER; note = 2'-O-methyladenosine-3'-phosphate
  modified_base 20: mod_base = OTHER; note = 2'-O-methylguanosine-3'-phosphate
  modified_base 21: mod_base = OTHER; note = 2'-O-methylguanosine-3'-phosphorothioate
  modified_base 22: mod_base = OTHER; note = 2'-O-methyladenosine-3'-phosphorothioate
  modified_base 23: mod_base = OTHER; note = 2'-O-methylcytidine
aatctcactttaatggagaggac

SEQ ID NO: 381 - RNA, 23 nt, synthetic construct
  source 1..23: mol_type = other RNA
  modified_base 1: mod_base = OTHER; note = 5'-methyluridine-3'-phosphate
  modified_base 4: mod_base = OTHER; note = 5'-methyluridine-3'-phosphate
  modified_base 14: mod_base = OTHER; note = 5'-methyluridine-3'-phosphate
  modified_base 16: mod_base = OTHER; note = 5'-methyluridine-3'-phosphate
  modified_base 22: mod_base = OTHER; note = 5'-methyluridine-3'-phosphate
tgctccagcagcctgtcccagtg

SEQ ID NO: 382 - RNA, 23 nt, synthetic construct
  source 1..23: mol_type = other RNA
  modified_base 3: mod_base = OTHER; note = 5'-methyluridine-3'-phosphate
  modified_base 5: mod_base = OTHER; note = 5'-methyluridine-3'-phosphate
  modified_base 11: mod_base = OTHER; note = 5'-methyluridine-3'-phosphate
cctgtcccagtgaggacagggac

SEQ ID NO: 383 - RNA, 23 nt, synthetic construct
  source 1..23: mol_type = other RNA
  modified_base 13: mod_base = OTHER; note = 5'-methyluridine-3'-phosphate
  modified_base 16: mod_base = OTHER; note = 5'-methyluridine-3'-phosphate
acagggacacagtactcggccac

SEQ ID NO: 384 - RNA, 23 nt, synthetic construct
  source 1..23: mol_type = other RNA
  modified_base 5: mod_base = OTHER; note = 5'-methyluridine-3'-phosphate
  modified_base 8: mod_base = OTHER; note = 5'-methyluridine-3'-phosphate
  modified_base 11: mod_base = OTHER; note = 5'-methyluridine-3'-phosphate
  modified_base 14: mod_base = OTHER; note = 5'-methyluridine-3'-phosphate
  modified_base 18: mod_base = OTHER; note = 5'-methyluridine-3'-phosphate
  modified_base 22: mod_base = OTHER; note = 5'-methyluridine-3'-phosphate
cacctcgtcctgctcagtgcctc

SEQ ID NO: 385 - RNA, 23 nt, synthetic construct
  source 1..23: mol_type = other RNA
  modified_base 8: mod_base = OTHER; note = 5'-methyluridine-3'-phosphate
  modified_base 10: mod_base = OTHER; note = 5'-methyluridine-3'-phosphate
  modified_base 12: mod_base = OTHER; note = 5'-methyluridine-3'-phosphate
  modified_base 13: mod_base = OTHER; note = 5'-methyluridine-3'-phosphate
  modified_base 16: mod_base = OTHER; note = 5'-methyluridine-3'-phosphate
gggaaagtctgttcatccgcagg

SEQ ID NO: 386 - RNA, 23 nt, synthetic construct
  source 1..23: mol_type = other RNA
  modified_base 2: mod_base = OTHER; note = 5'-methyluridine-3'-phosphate
atccgcagggagcaggccaacaa

SEQ ID NO: 387 - RNA, 23 nt, synthetic construct
  source 1..23: mol_type = other RNA
  modified_base 17: mod_base = OTHER; note = 5'-methyluridine-3'-phosphate
  modified_base 20: mod_base = OTHER; note = 5'-methyluridine-3'-phosphate
gagcaggccaacaacatcctggc

SEQ ID NO: 388 - RNA, 23 nt, synthetic construct
  source 1..23: mol_type = other RNA
  modified_base 4: mod_base = OTHER; note = 5'-methyluridine-3'-phosphate
  modified_base 7: mod_base = OTHER; note = 5'-methyluridine-3'-phosphate
  modified_base 16: mod_base = OTHER; note = 5'-methyluridine-3'-phosphate
acatcctggcgagggtcacgagg

SEQ ID NO: 389 - RNA, 23 nt, synthetic construct
  source 1..23: mol_type = other RNA
  modified_base 3: mod_base = OTHER; note = 5'-methyluridine-3'-phosphate
  modified_base 16: mod_base = OTHER; note = 5'-methyluridine-3'-phosphate
  modified_base 17: mod_base = OTHER; note = 5'-methyluridine-3'-phosphate
  modified_base 20: mod_base = OTHER; note = 5'-methyluridine-3'-phosphate
  modified_base 21: mod_base = OTHER; note = 5'-methyluridine-3'-phosphate
  modified_base 22: mod_base = OTHER; note = 5'-methyluridine-3'-phosphate
ggtcacgagggccaattcctttc

SEQ ID NO: 390 - RNA, 23 nt, synthetic construct
  source 1..23: mol_type = other RNA
  modified_base 7: mod_base = OTHER; note = 5'-methyluridine-3'-phosphate
  modified_base 8: mod_base = OTHER; note = 5'-methyluridine-3'-phosphate
  modified_base 11: mod_base = OTHER; note = 5'-methyluridine-3'-phosphate
  modified_base 12: mod_base = OTHER; note = 5'-methyluridine-3'-phosphate
  modified_base 13: mod_base = OTHER; note = 5'-methyluridine-3'-phosphate
  modified_base 15: mod_base = OTHER; note = 5'-methyluridine-3'-phosphate
  modified_base 16: mod_base = OTHER; note = 5'-methyluridine-3'-phosphate
ggccaattcctttcttgaagaga

SEQ ID NO: 391 - RNA, 23 nt, synthetic construct
  source 1..23: mol_type = other RNA
  modified_base 2: mod_base = OTHER; note = 5'-methyluridine-3'-phosphate
  modified_base 3: mod_base = OTHER; note = 5'-methyluridine-3'-phosphate
  modified_base 4: mod_base = OTHER; note = 5'-methyluridine-3'-phosphate
  modified_base 6: mod_base = OTHER; note = 5'-methyluridine-3'-phosphate
  modified_base 7: mod_base = OTHER; note = 5'-methyluridine-3'-phosphate
  modified_base 15: mod_base = OTHER; note = 5'-methyluridine-3'-phosphate
ctttcttgaagagatgaagaaag

SEQ ID NO: 392 - RNA, 23 nt, synthetic construct
  source 1..23: mol_type = other RNA
  modified_base 15: mod_base = OTHER; note = 5'-methyluridine-3'-phosphate
gaagaaaggacacctcgaaagag

SEQ ID NO: 393 - RNA, 23 nt, synthetic construct
  source 1..23: mol_type = other RNA
  modified_base 6: mod_base = OTHER; note = 5'-methyluridine-3'-phosphate
  modified_base 17: mod_base = OTHER; note = 5'-methyluridine-3'-phosphate
  modified_base 21: mod_base = OTHER; note = 5'-methyluridine-3'-phosphate
acacctcgaaagagagtgcatgg

SEQ ID NO: 394 - RNA, 23 nt, synthetic construct
  source 1..23: mol_type = other RNA
  modified_base 4: mod_base = OTHER; note = 5'-methyluridine-3'-phosphate
  modified_base 8: mod_base = OTHER; note = 5'-methyluridine-3'-phosphate
  modified_base 19: mod_base = OTHER; note = 5'-methyluridine-3'-phosphate
  modified_base 22: mod_base = OTHER; note = 5'-methyluridine-3'-phosphate
gagtgcatggaagagacctgctc

SEQ ID NO: 395 - RNA, 23 nt, synthetic construct
  source 1..23: mol_type = other RNA
  modified_base 7: mod_base = OTHER; note = 5'-methyluridine-3'-phosphate
  modified_base 10: mod_base = OTHER; note = 5'-methyluridine-3'-phosphate
  modified_base 13: mod_base = OTHER; note = 5'-methyluridine-3'-phosphate
gagacctgctcatacgaagaggc

SEQ ID NO: 396 - RNA, 23 nt, synthetic construct
  source 1..23: mol_type = other RNA
  modified_base 19: mod_base = OTHER; note = 5'-methyluridine-3'-phosphate
  modified_base 21: mod_base = OTHER; note = 5'-methyluridine-3'-phosphate
  modified_base 22: mod_base = OTHER; note = 5'-methyluridine-3'-phosphate
  modified_base 23: mod_base = OTHER; note = 5'-methyluridine
acgaagaggcccgcgaggtcttt

SEQ ID NO: 397 - RNA, 23 nt, synthetic construct
  source 1..23: mol_type = other RNA
  modified_base 10: mod_base = OTHER; note = 5'-methyluridine-3'-phosphate
  modified_base 12: mod_base = OTHER; note = 5'-methyluridine-3'-phosphate
  modified_base 13: mod_base = OTHER; note = 5'-methyluridine-3'-phosphate
  modified_base 14: mod_base = OTHER; note = 5'-methyluridine-3'-phosphate
cccgcgaggtctttgaggacagc

SEQ ID NO: 398 - RNA, 23 nt, synthetic construct
  source 1..23: mol_type = other RNA
  modified_base 1: mod_base = OTHER; note = 5'-methyluridine-3'-phosphate
  modified_base 2: mod_base = OTHER; note = 5'-methyluridine-3'-phosphate
  modified_base 3: mod_base = OTHER; note = 5'-methyluridine-3'-phosphate
tttgaggacagcgacaagacgaa

SEQ ID NO: 399 - RNA, 23 nt, synthetic construct
  source 1..23: mol_type = other RNA
  modified_base 15: mod_base = OTHER; note = 5'-methyluridine-3'-phosphate
  modified_base 19: mod_base = OTHER; note = 5'-methyluridine-3'-phosphate
  modified_base 20: mod_base = OTHER; note = 5'-methyluridine-3'-phosphate
  modified_base 22: mod_base = OTHER; note = 5'-methyluridine-3'-phosphate
agcgacaagacgaatgaattctg

SEQ ID NO: 400 - RNA, 23 nt, synthetic construct
  source 1..23: mol_type = other RNA
  modified_base 6: mod_base = OTHER; note = 5'-methyluridine-3'-phosphate
  modified_base 10: mod_base = OTHER; note = 5'-methyluridine-3'-phosphate
  modified_base 11: mod_base = OTHER; note = 5'-methyluridine-3'-phosphate
  modified_base 13: mod_base = OTHER; note = 5'-methyluridine-3'-phosphate
  modified_base 18: mod_base = OTHER; note = 5'-methyluridine-3'-phosphate
  modified_base 22: mod_base = OTHER; note = 5'-methyluridine-3'-phosphate
acgaatgaattctggaataaata

SEQ ID NO: 401 - RNA, 23 nt, synthetic construct
  source 1..23: mol_type = other RNA
  modified_base 1: mod_base = OTHER; note = 5'-methyluridine-3'-phosphate
  modified_base 2: mod_base = OTHER; note = 5'-methyluridine-3'-phosphate
  modified_base 4: mod_base = OTHER; note = 5'-methyluridine-3'-phosphate
  modified_base 9: mod_base = OTHER; note = 5'-methyluridine-3'-phosphate
  modified_base 13: mod_base = OTHER; note = 5'-methyluridine-3'-phosphate
  modified_base 21: mod_base = OTHER; note = 5'-methyluridine-3'-phosphate
ttctggaataaatacaaagatgg

SEQ ID NO: 402 - RNA, 23 nt, synthetic construct
  source 1..23: mol_type = other RNA
  modified_base 2: mod_base = OTHER; note = 5'-methyluridine-3'-phosphate
  modified_base 10: mod_base = OTHER; note = 5'-methyluridine-3'-phosphate
  modified_base 20: mod_base = OTHER; note = 5'-methyluridine-3'-phosphate
  modified_base 22: mod_base = OTHER; note = 5'-methyluridine-3'-phosphate
atacaaagatggcgaccagtgtg

SEQ ID NO: 403 - RNA, 23 nt, synthetic construct
  source 1..23: mol_type = other RNA
  modified_base 10: mod_base = OTHER; note = 5'-methyluridine-3'-phosphate
  modified_base 12: mod_base = OTHER; note = 5'-methyluridine-3'-phosphate
  modified_base 21: mod_base = OTHER; note = 5'-methyluridine-3'-phosphate
ggcgaccagtgtgagaccagtcc

SEQ ID NO: 404 - RNA, 23 nt, synthetic construct
  source 1..23: mol_type = other RNA
  modified_base 1: mod_base = OTHER; note = 5'-methyluridine-3'-phosphate
  modified_base 10: mod_base = OTHER; note = 5'-methyluridine-3'-phosphate
  modified_base 13: mod_base = OTHER; note = 5'-methyluridine-3'-phosphate
  modified_base 14: mod_base = OTHER; note = 5'-methyluridine-3'-phosphate
tgagaccagtccttgccagaacc

SEQ ID NO: 405 - RNA, 23 nt, synthetic construct
  source 1..23: mol_type = other RNA
  modified_base 3: mod_base = OTHER; note = 5'-methyluridine-3'-phosphate
  modified_base 4: mod_base = OTHER; note = 5'-methyluridine-3'-phosphate
  modified_base 22: mod_base = OTHER; note = 5'-methyluridine-3'-phosphate
ccttgccagaaccagggcaaatg

SEQ ID NO: 406 - RNA, 23 nt, synthetic construct
  source 1..23: mol_type = other RNA
  modified_base 13: mod_base = OTHER; note = 5'-methyluridine-3'-phosphate
  modified_base 15: mod_base = OTHER; note = 5'-methyluridine-3'-phosphate
aaccagggcaaatgtaaagacgg

SEQ ID NO: 407 - RNA, 23 nt, synthetic construct
  source 1..23: mol_type = other RNA
  modified_base 2: mod_base = OTHER; note = 5'-methyluridine-3'-phosphate
  modified_base 8: mod_base = OTHER; note = 5'-methyluridine-3'-phosphate
  modified_base 14: mod_base = OTHER; note = 5'-methyluridine-3'-phosphate
  modified_base 16: mod_base = OTHER; note = 5'-methyluridine-3'-phosphate
  modified_base 17: mod_base = OTHER; note = 5'-methyluridine-3'-phosphate
  modified_base 18: mod_base = OTHER; note = 5'-methyluridine-3'-phosphate
atacacctgcacctgtttagaag

SEQ ID NO: 408 - RNA, 23 nt, synthetic construct
  source 1..23: mol_type = other RNA
  modified_base 5: mod_base = OTHER; note = 5'-methyluridine-3'-phosphate
  modified_base 7: mod_base = OTHER; note = 5'-methyluridine-3'-phosphate
  modified_base 8: mod_base = OTHER; note = 5'-methyluridine-3'-phosphate
  modified_base 9: mod_base = OTHER; note = 5'-methyluridine-3'-phosphate
  modified_base 17: mod_base = OTHER; note = 5'-methyluridine-3'-phosphate
  modified_base 18: mod_base = OTHER; note = 5'-methyluridine-3'-phosphate
cacctgtttagaaggattcgaag

SEQ ID NO: 409 - RNA, 23 nt, synthetic construct
  source 1..23: mol_type = other RNA
  modified_base 6: mod_base = OTHER; note = 5'-methyluridine-3'-phosphate
  modified_base 8: mod_base = OTHER; note = 5'-methyluridine-3'-phosphate
  modified_base 12: mod_base = OTHER; note = 5'-methyluridine-3'-phosphate
  modified_base 13: mod_base = OTHER; note = 5'-methyluridine-3'-phosphate
  modified_base 15: mod_base = OTHER; note = 5'-methyluridine-3'-phosphate
  modified_base 16: mod_base = OTHER; note = 5'-methyluridine-3'-phosphate
aaaactgtgaattattcacacgg

SEQ ID NO: 410 - RNA, 23 nt, synthetic construct
  source 1..23: mol_type = other RNA
  modified_base 3: mod_base = OTHER; note = 5'-methyluridine-3'-phosphate
  modified_base 4: mod_base = OTHER; note = 5'-methyluridine-3'-phosphate
  modified_base 6: mod_base = OTHER; note = 5'-methyluridine-3'-phosphate
  modified_base 7: mod_base = OTHER; note = 5'-methyluridine-3'-phosphate
  modified_base 19: mod_base = OTHER; note = 5'-methyluridine-3'-phosphate
  modified_base 21: mod_base = OTHER; note = 5'-methyluridine-3'-phosphate
aattattcacacggaagctctgc

SEQ ID NO: 411 - RNA, 23 nt, synthetic construct
  source 1..23: mol_type = other RNA
  modified_base 4: mod_base = OTHER; note = 5'-methyluridine-3'-phosphate
  modified_base 6: mod_base = OTHER; note = 5'-methyluridine-3'-phosphate
  modified_base 13: mod_base = OTHER; note = 5'-methyluridine-3'-phosphate
agctctgcagcctggacaacggg

SEQ ID NO: 412 - RNA, 23 nt, synthetic construct
  source 1..23: mol_type = other RNA
  modified_base 3: mod_base = OTHER; note = 5'-methyluridine-3'-phosphate
  modified_base 5: mod_base = OTHER; note = 5'-methyluridine-3'-phosphate
  modified_base 12: mod_base = OTHER; note = 5'-methyluridine-3'-phosphate
  modified_base 13: mod_base = OTHER; note = 5'-methyluridine-3'-phosphate
  modified_base 15: mod_base = OTHER; note = 5'-methyluridine-3'-phosphate
actgtgaccagttctgccacgag

SEQ ID NO: 413 - RNA, 23 nt, synthetic construct
  source 1..23: mol_type = other RNA
  modified_base 18: mod_base = OTHER; note = 5'-methyluridine-3'-phosphate
  modified_base 20: mod_base = OTHER; note = 5'-methyluridine-3'-phosphate
  modified_base 22: mod_base = OTHER; note = 5'-methyluridine-3'-phosphate
gccacgaggaacagaactctgtg

SEQ ID NO: 414 - RNA, 23 nt, synthetic construct
  source 1..23: mol_type = other RNA
  modified_base 7: mod_base = OTHER; note = 5'-methyluridine-3'-phosphate
  modified_base 9: mod_base = OTHER; note = 5'-methyluridine-3'-phosphate
  modified_base 11: mod_base = OTHER; note = 5'-methyluridine-3'-phosphate
  modified_base 14: mod_base = OTHER; note = 5'-methyluridine-3'-phosphate
  modified_base 16: mod_base = OTHER; note = 5'-methyluridine-3'-phosphate
  modified_base 19: mod_base = OTHER; note = 5'-methyluridine-3'-phosphate
  modified_base 22: mod_base = OTHER; note = 5'-methyluridine-3'-phosphate
cagaactctgtggtgtgctcctg

SEQ ID NO: 415 - RNA, 23 nt, synthetic construct
  source 1..23: mol_type = other RNA
  modified_base 5: mod_base = OTHER; note = 5'-methyluridine-3'-phosphate
  modified_base 9: mod_base = OTHER; note = 5'-methyluridine-3'-phosphate
accctggctgacaacggcaaggc

SEQ ID NO: 416 - RNA, 23 nt, synthetic construct
  source 1..23: mol_type = other RNA
  modified_base 8: mod_base = OTHER; note = 5'-methyluridine-3'-phosphate
  modified_base 12: mod_base = OTHER; note = 5'-methyluridine-3'-phosphate
  modified_base 13: mod_base = OTHER; note = 5'-methyluridine-3'-phosphate
caaggcctgcattcccacagggc

SEQ ID NO: 417 - RNA, 23 nt, synthetic construct
  source 1..23: mol_type = other RNA
  modified_base 3: mod_base = OTHER; note = 5'-methyluridine-3'-phosphate
  modified_base 5: mod_base = OTHER; note = 5'-methyluridine-3'-phosphate
  modified_base 19: mod_base = OTHER; note = 5'-methyluridine-3'-phosphate
cctgtgggaaacagaccctggaa

SEQ ID NO: 418 - RNA, 23 nt, synthetic construct
  source 1..23: mol_type = other RNA
  modified_base 9: mod_base = OTHER; note = 5'-methyluridine-3'-phosphate
acagaccctggaacgcaggaaga

SEQ ID NO: 419 - RNA, 23 nt, synthetic construct
  source 1..23: mol_type = other RNA
  modified_base 17: mod_base = OTHER; note = 5'-methyluridine-3'-phosphate
  modified_base 21: mod_base = OTHER; note = 5'-methyluridine-3'-phosphate
ggaacgcaggaagaggtcagtgg

SEQ ID NO: 420 - RNA, 23 nt, synthetic construct
  source 1..23: mol_type = other RNA
  modified_base 4: mod_base = OTHER; note = 5'-methyluridine-3'-phosphate
  modified_base 12: mod_base = OTHER; note = 5'-methyluridine-3'-phosphate
  modified_base 17: mod_base = OTHER; note = 5'-methyluridine-3'-phosphate
ccctgacagcatcacatggaagc

SEQ ID NO: 421 - RNA, 23 nt, synthetic construct
  source 1..23: mol_type = other RNA
  modified_base 3: mod_base = OTHER; note = 5'-methyluridine-3'-phosphate
  modified_base 8: mod_base = OTHER; note = 5'-methyluridine-3'-phosphate
  modified_base 17: mod_base = OTHER; note = 5'-methyluridine-3'-phosphate
  modified_base 19: mod_base = OTHER; note = 5'-methyluridine-3'-phosphate
  modified_base 22: mod_base = OTHER; note = 5'-methyluridine-3'-phosphate
catcacatggaagccatatgatg

SEQ ID NO: 422 - RNA, 23 nt, synthetic construct
  source 1..23: mol_type = other RNA
  modified_base 8: mod_base = OTHER; note = 5'-methyluridine-3'-phosphate
  modified_base 10: mod_base = OTHER; note = 5'-methyluridine-3'-phosphate
  modified_base 13: mod_base = OTHER; note = 5'-methyluridine-3'-phosphate
gaagccatatgatgcagccgacc

SEQ ID NO: 423 - RNA, 23 nt, synthetic construct
  source 1..23: mol_type = other RNA
  modified_base 4: mod_base = OTHER; note = 5'-methyluridine-3'-phosphate
  modified_base 7: mod_base = OTHER; note = 5'-methyluridine-3'-phosphate
  modified_base 8: mod_base = OTHER; note = 5'-methyluridine-3'-phosphate
  modified_base 12: mod_base = OTHER; note = 5'-methyluridine-3'-phosphate
  modified_base 13: mod_base = OTHER; note = 5'-methyluridine-3'-phosphate
acctgcttgacttcaaccagacg

SEQ ID NO: 424 - RNA, 23 nt, synthetic construct
  source 1..23: mol_type = other RNA
  modified_base 3: mod_base = OTHER; note = 5'-methyluridine-3'-phosphate
  modified_base 4: mod_base = OTHER; note = 5'-methyluridine-3'-phosphate
  modified_base 20: mod_base = OTHER; note = 5'-methyluridine-3'-phosphate
acttcaaccagacgcagcctgag

SEQ ID NO: 425 - RNA, 23 nt, synthetic construct
  source 1..23: mol_type = other RNA
  modified_base 14: mod_base = OTHER; note = 5'-methyluridine-3'-phosphate
  modified_base 23: mod_base = OTHER; note = 5'-methyluridine
ggcgacaacaacctcaccaggat

SEQ ID NO: 426 - RNA, 23 nt, synthetic construct
  source 1..23: mol_type = other RNA
  modified_base 5: mod_base = OTHER; note = 5'-methyluridine-3'-phosphate
  modified_base 14: mod_base = OTHER; note = 5'-methyluridine-3'-phosphate
  modified_base 17: mod_base = OTHER; note = 5'-methyluridine-3'-phosphate
aacctcaccaggatcgtgggagg

SEQ ID NO: 427 - RNA, 23 nt, synthetic construct
  source 1..23: mol_type = other RNA
  modified_base 13: mod_base = OTHER; note = 5'-methyluridine-3'-phosphate
ggaggccaggaatgcaaggacgg

SEQ ID NO: 428 - RNA, 23 nt, synthetic construct
  source 1..23: mol_type = other RNA
  modified_base 3: mod_base = OTHER; note = 5'-methyluridine-3'-phosphate
  modified_base 13: mod_base = OTHER; note = 5'-methyluridine-3'-phosphate
  modified_base 16: mod_base = OTHER; note = 5'-methyluridine-3'-phosphate
  modified_base 19: mod_base = OTHER; note = 5'-methyluridine-3'-phosphate
  modified_base 23: mod_base = OTHER; note = 5'-methyluridine
cctggcaggccctgctcatcaat

SEQ ID NO: 429 - RNA, 23 nt, synthetic construct
  source 1..23: mol_type = other RNA
  modified_base 4: mod_base = OTHER; note = 5'-methyluridine-3'-phosphate
  modified_base 7: mod_base = OTHER; note = 5'-methyluridine-3'-phosphate
  modified_base 10: mod_base = OTHER; note = 5'-methyluridine-3'-phosphate
  modified_base 14: mod_base = OTHER; note = 5'-methyluridine-3'-phosphate
ccctgctcatcaatgaggaaaac

SEQ ID NO: 430 - RNA, 23 nt, synthetic construct
  source 1..23: mol_type = other RNA
  modified_base 1: mod_base = OTHER; note = 5'-methyluridine-3'-phosphate
  modified_base 5: mod_base = OTHER; note = 5'-methyluridine-3'-phosphate
  modified_base 20: mod_base = OTHER; note = 5'-methyluridine-3'-phosphate
  modified_base 21: mod_base = OTHER; note = 5'-methyluridine-3'-phosphate
  modified_base 22: mod_base = OTHER; note = 5'-methyluridine-3'-phosphate
tcaatgaggaaaacgagggtttc

SEQ ID NO: 431 - RNA, 23 nt, synthetic construct
  source 1..23: mol_type = other RNA
  modified_base 11: mod_base = OTHER; note = 5'-methyluridine-3'-phosphate
  modified_base 12: mod_base = OTHER; note = 5'-methyluridine-3'-phosphate
  modified_base 13: mod_base = OTHER; note = 5'-methyluridine-3'-phosphate
  modified_base 15: mod_base = OTHER; note = 5'-methyluridine-3'-phosphate
  modified_base 17: mod_base = OTHER; note = 5'-methyluridine-3'-phosphate
  modified_base 20: mod_base = OTHER; note = 5'-methyluridine-3'-phosphate
aaaacgagggtttctgtggtgga

SEQ ID NO: 432 - RNA, 23 nt, synthetic construct
  source 1..23: mol_type = other RNA
  modified_base 2: mod_base = OTHER; note = 5'-methyluridine-3'-phosphate
  modified_base 3: mod_base = OTHER; note = 5'-methyluridine-3'-phosphate
  modified_base 4: mod_base = OTHER; note = 5'-methyluridine-3'-phosphate
  modified_base 6: mod_base = OTHER; note = 5'-methyluridine-3'-phosphate
  modified_base 8: mod_base = OTHER; note = 5'-methyluridine-3'-phosphate
  modified_base 11: mod_base = OTHER; note = 5'-methyluridine-3'-phosphate
  modified_base 19: mod_base = OTHER; note = 5'-methyluridine-3'-phosphate
  modified_base 20: mod_base = OTHER; note = 5'-methyluridine-3'-phosphate
  modified_base 22: mod_base = OTHER; note = 5'-methyluridine-3'-phosphate
gtttctgtggtggaaccattctg

SEQ ID NO: 433 - RNA, 23 nt, synthetic construct
  source 1..23: mol_type = other RNA
  modified_base 8: mod_base = OTHER; note = 5'-methyluridine-3'-phosphate
  modified_base 9: mod_base = OTHER; note = 5'-methyluridine-3'-phosphate
  modified_base 11: mod_base = OTHER; note = 5'-methyluridine-3'-phosphate
  modified_base 19: mod_base = OTHER; note = 5'-methyluridine-3'-phosphate
  modified_base 20: mod_base = OTHER; note = 5'-methyluridine-3'-phosphate
  modified_base 22: mod_base = OTHER; note = 5'-methyluridine-3'-phosphate
ggaaccattctgagcgagttcta

SEQ ID NO: 434 - RNA, 23 nt, synthetic construct
  source 1..23: mol_type = other RNA
  modified_base 2: mod_base = OTHER; note = 5'-methyluridine-3'-phosphate
  modified_base 10: mod_base = OTHER; note = 5'-methyluridine-3'-phosphate
  modified_base 11: mod_base = OTHER; note = 5'-methyluridine-3'-phosphate
  modified_base 13: mod_base = OTHER; note = 5'-methyluridine-3'-phosphate
  modified_base 17: mod_base = OTHER; note = 5'-methyluridine-3'-phosphate
  modified_base 20: mod_base = OTHER; note = 5'-methyluridine-3'-phosphate
ctgagcgagttctacatcctaac

SEQ ID NO: 435 - RNA, 23 nt, synthetic construct
  source 1..23: mol_type = other RNA
  modified_base 1: mod_base = OTHER; note = 5'-methyluridine-3'-phosphate
  modified_base 2: mod_base = OTHER; note = 5'-methyluridine-3'-phosphate
  modified_base 4: mod_base = OTHER; note = 5'-methyluridine-3'-phosphate
  modified_base 8: mod_base = OTHER; note = 5'-methyluridine-3'-phosphate
  modified_base 11: mod_base = OTHER; note = 5'-methyluridine-3'-phosphate
ttctacatcctaacggcagccca

SEQ ID NO: 436 - RNA, 23 nt, synthetic construct
  source 1..23: mol_type = other RNA
  modified_base 2: mod_base = OTHER; note = 5'-methyluridine-3'-phosphate
  modified_base 16: mod_base = OTHER; note = 5'-methyluridine-3'-phosphate
  modified_base 18: mod_base = OTHER; note = 5'-methyluridine-3'-phosphate
  modified_base 20: mod_base = OTHER; note = 5'-methyluridine-3'-phosphate
  modified_base 22: mod_base = OTHER; note = 5'-methyluridine-3'-phosphate
ctaacggcagcccactgtctcta

SEQ ID NO: 437 - RNA, 23 nt, synthetic construct
  source 1..23: mol_type = other RNA
  modified_base 7: mod_base = OTHER; note = 5'-methyluridine-3'-phosphate
  modified_base 9: mod_base = OTHER; note = 5'-methyluridine-3'-phosphate
  modified_base 11: mod_base = OTHER; note = 5'-methyluridine-3'-phosphate
  modified_base 13: mod_base = OTHER; note = 5'-methyluridine-3'-phosphate
gcccactgtctctaccaagccaa

SEQ ID NO: 438 - RNA, 23 nt, synthetic construct
  source 1..23: mol_type = other RNA
  modified_base 1: mod_base = OTHER; note = 5'-methyluridine-3'-phosphate
  modified_base 3: mod_base = OTHER; note = 5'-methyluridine-3'-phosphate
  modified_base 18: mod_base = OTHER; note = 5'-methyluridine-3'-phosphate
  modified_base 19: mod_base = OTHER; note = 5'-methyluridine-3'-phosphate
tctaccaagccaagagattcaag

SEQ ID NO: 439 - RNA, 23 nt, synthetic construct
  source 1..23: mol_type = other RNA
  modified_base 8: mod_base = OTHER; note = 5'-methyluridine-3'-phosphate
  modified_base 9: mod_base = OTHER; note = 5'-methyluridine-3'-phosphate
  modified_base 15: mod_base = OTHER; note = 5'-methyluridine-3'-phosphate
  modified_base 21: mod_base = OTHER; note = 5'-methyluridine-3'-phosphate
caagagattcaaggtgagggtag

SEQ ID NO: 440 - RNA, 23 nt, synthetic construct
  source 1..23: mol_type = other RNA
  modified_base 7: mod_base = OTHER; note = 5'-methyluridine-3'-phosphate
  modified_base 13: mod_base = OTHER; note = 5'-methyluridine-3'-phosphate
  modified_base 16: mod_base = OTHER; note = 5'-methyluridine-3'-phosphate
  modified_base 19: mod_base = OTHER; note = 5'-methyluridine-3'-phosphate
acgaggtggaggtggtcatcaag

SEQ ID NO: 441 - RNA, 23 nt, synthetic construct
  source 1..23: mol_type = other RNA
  modified_base 4: mod_base = OTHER; note = 5'-methyluridine-3'-phosphate
  modified_base 7: mod_base = OTHER; note = 5'-methyluridine-3'-phosphate
  modified_base 10: mod_base = OTHER; note = 5'-methyluridine-3'-phosphate
aggtggtcatcaagcacaaccgg

SEQ ID NO: 442 - RNA, 23 nt, synthetic construct
  source 1..23: mol_type = other RNA
  modified_base 1: mod_base = OTHER; note = 5'-methyluridine-3'-phosphate
  modified_base 15: mod_base = OTHER; note = 5'-methyluridine-3'-phosphate
  modified_base 16: mod_base = OTHER; note = 5'-methyluridine-3'-phosphate
tcaagcacaaccggttcacaaag

SEQ ID NO: 443 - RNA, 23 nt, synthetic construct
  source 1..23: mol_type = other RNA
  modified_base 1: mod_base = OTHER; note = 5'-methyluridine-3'-phosphate
  modified_base 15: mod_base = OTHER; note = 5'-methyluridine-3'-phosphate
  modified_base 17: mod_base = OTHER; note = 5'-methyluridine-3'-phosphate
  modified_base 21: mod_base = OTHER; note = 5'-methyluridine-3'-phosphate
  modified_base 22: mod_base = OTHER; note = 5'-methyluridine-3'-phosphate
tcacaaaggagacctatgacttc

SEQ ID NO: 444 - RNA, 23 nt, synthetic construct
  source 1..23: mol_type = other RNA
  modified_base 6: mod_base = OTHER; note = 5'-methyluridine-3'-phosphate
  modified_base 8: mod_base = OTHER; note = 5'-methyluridine-3'-phosphate
  modified_base 12: mod_base = OTHER; note = 5'-methyluridine-3'-phosphate
  modified_base 13: mod_base = OTHER; note = 5'-methyluridine-3'-phosphate
  modified_base 19: mod_base = OTHER; note = 5'-methyluridine-3'-phosphate
agacctatgacttcgacatcgcc

SEQ ID NO: 445 - RNA, 23 nt, synthetic construct
  source 1..23: mol_type = other RNA
  modified_base 3: mod_base = OTHER; note = 5'-methyluridine-3'-phosphate
  modified_base 4: mod_base = OTHER; note = 5'-methyluridine-3'-phosphate
  modified_base 10: mod_base = OTHER; note = 5'-methyluridine-3'-phosphate
  modified_base 16: mod_base = OTHER; note = 5'-methyluridine-3'-phosphate
  modified_base 19: mod_base = OTHER; note = 5'-methyluridine-3'-phosphate
acttcgacatcgccgtgctccgg

SEQ ID NO: 446 - RNA, 23 nt, synthetic construct
  source 1..23: mol_type = other RNA
  modified_base 4: mod_base = OTHER; note = 5'-methyluridine-3'-phosphate
  modified_base 9: mod_base = OTHER; note = 5'-methyluridine-3'-phosphate
  modified_base 10: mod_base = OTHER; note = 5'-methyluridine-3'-phosphate
  modified_base 16: mod_base = OTHER; note = 5'-methyluridine-3'-phosphate
  modified_base 22: mod_base = OTHER; note = 5'-methyluridine-3'-phosphate
ccatcaccttccgcatgaacgtg

SEQ ID NO: 447 - RNA, 23 nt, synthetic construct
  source 1..23: mol_type = other RNA
  modified_base 3: mod_base = OTHER; note = 5'-methyluridine-3'-phosphate
  modified_base 12: mod_base = OTHER; note = 5'-methyluridine-3'-phosphate
  modified_base 19: mod_base = OTHER; note = 5'-methyluridine-3'-phosphate
  modified_base 22: mod_base = OTHER; note = 5'-methyluridine-3'-phosphate
actgggccgagtccacgctgatg

SEQ ID NO: 448 - RNA, 23 nt, synthetic construct
  source 1..23: mol_type = other RNA
  modified_base 7: mod_base = OTHER; note = 5'-methyluridine-3'-phosphate
  modified_base 10: mod_base = OTHER; note = 5'-methyluridine-3'-phosphate
ccacgctgatgacgcagaagacg

SEQ ID NO: 449 - RNA, 23 nt, synthetic construct
  source 1..23: mol_type = other RNA
  modified_base 6: mod_base = OTHER; note = 5'-methyluridine-3'-phosphate
  modified_base 16: mod_base = OTHER; note = 5'-methyluridine-3'-phosphate
  modified_base 22: mod_base = OTHER; note = 5'-methyluridine-3'-phosphate
ggcagtccaccaggctcaagatg

SEQ ID NO: 450 - RNA, 23 nt, synthetic construct
  source 1..23: mol_type = other RNA
  modified_base 7: mod_base = OTHER; note = 5'-methyluridine-3'-phosphate
  modified_base 13: mod_base = OTHER; note = 5'-methyluridine-3'-phosphate
  modified_base 16: mod_base = OTHER; note = 5'-methyluridine-3'-phosphate
  modified_base 22: mod_base = OTHER; note = 5'-methyluridine-3'-phosphate
ccaggctcaagatgctggaggtg

SEQ ID NO: 451 - RNA, 23 nt, synthetic construct
  source 1..23: mol_type = other RNA
  modified_base 1: mod_base = OTHER; note = 5'-methyluridine-3'-phosphate
  modified_base 4: mod_base = OTHER; note = 5'-methyluridine-3'-phosphate
  modified_base 10: mod_base = OTHER; note = 5'-methyluridine-3'-phosphate
  modified_base 15: mod_base = OTHER; note = 5'-methyluridine-3'-phosphate
  modified_base 19: mod_base = OTHER; note = 5'-methyluridine-3'-phosphate
tgctggaggtgccctacgtggac

SEQ ID NO: 452 - RNA, 23 nt, synthetic construct
  source 1..23: mol_type = other RNA
  modified_base 4: mod_base = OTHER; note = 5'-methyluridine-3'-phosphate
  modified_base 8: mod_base = OTHER; note = 5'-methyluridine-3'-phosphate
  modified_base 22: mod_base = OTHER; note = 5'-methyluridine-3'-phosphate
ccctacgtggaccgcaacagctg

SEQ ID NO: 453 - RNA, 23 nt, synthetic construct
  source 1..23: mol_type = other RNA
  modified_base 13: mod_base = OTHER; note = 5'-methyluridine-3'-phosphate
  modified_base 20: mod_base = OTHER; note = 5'-methyluridine-3'-phosphate
  modified_base 22: mod_base = OTHER; note = 5'-methyluridine-3'-phosphate
gaccgcaacagctgcaagctgtc

SEQ ID NO: 454 - RNA, 23 nt, synthetic construct
  source 1..23: mol_type = other RNA
  modified_base 4: mod_base = OTHER; note = 5'-methyluridine-3'-phosphate
  modified_base 11: mod_base = OTHER; note = 5'-methyluridine-3'-phosphate
  modified_base 13: mod_base = OTHER; note = 5'-methyluridine-3'-phosphate
  modified_base 22: mod_base = OTHER; note = 5'-methyluridine-3'-phosphate
  modified_base 23: mod_base = OTHER; note = 5'-methyluridine
agctgcaagctgtccagcagctt

SEQ ID NO: 455 - RNA, 23 nt, synthetic construct
  source 1..23: mol_type = other RNA
  modified_base 2: mod_base = OTHER; note = 5'-methyluridine-3'-phosphate
  modified_base 4: mod_base = OTHER; note = 5'-methyluridine-3'-phosphate
  modified_base 13: mod_base = OTHER; note = 5'-methyluridine-3'-phosphate
  modified_base 14: mod_base = OTHER; note = 5'-methyluridine-3'-phosphate
  modified_base 17: mod_base = OTHER; note = 5'-methyluridine-3'-phosphate
  modified_base 20: mod_base = OTHER; note = 5'-methyluridine-3'-phosphate
ctgtccagcagcttcatcatcac

SEQ ID NO: 456 - RNA, 23 nt, synthetic construct
  source 1..23: mol_type = other RNA
  modified_base 2: mod_base = OTHER; note = 5'-methyluridine-3'-phosphate
  modified_base 5: mod_base = OTHER; note = 5'-methyluridine-3'-phosphate
  modified_base 17: mod_base = OTHER; note = 5'-methyluridine-3'-phosphate
  modified_base 19: mod_base = OTHER; note = 5'-methyluridine-3'-phosphate
  modified_base 20: mod_base = OTHER; note = 5'-methyluridine-3'-phosphate
  modified_base 22: mod_base = OTHER; note = 5'-methyluridine-3'-phosphate
atcatcacccagaacatgttctg

SEQ ID NO: 457 - RNA, 23 nt, synthetic construct
  source 1..23: mol_type = other RNA
  modified_base 8: mod_base = OTHER; note = 5'-methyluridine-3'-phosphate
  modified_base 10: mod_base = OTHER; note = 5'-methyluridine-3'-phosphate
  modified_base 11: mod_base = OTHER; note = 5'-methyluridine-3'-phosphate
  modified_base 13: mod_base = OTHER; note = 5'-methyluridine-3'-phosphate
  modified_base 15: mod_base = OTHER; note = 5'-methyluridine-3'-phosphate
  modified_base 22: mod_base = OTHER; note = 5'-methyluridine-3'-phosphate
cagaacatgttctgtgccggcta

SEQ ID NO: 458 - RNA, 23 nt, synthetic construct
  source 1..23: mol_type = other RNA
  modified_base 1: mod_base = OTHER; note = 5'-methyluridine-3'-phosphate
  modified_base 8: mod_base = OTHER; note = 5'-methyluridine-3'-phosphate
tgccggctacgacaccaagcagg

SEQ ID NO: 459 - RNA, 23 nt, synthetic construct
  source 1..23: mol_type = other RNA
  modified_base 18: mod_base = OTHER; note = 5'-methyluridine-3'-phosphate
  modified_base 22: mod_base = OTHER; note = 5'-methyluridine-3'-phosphate
gacaccaagcaggaggatgcctg

SEQ ID NO: 460 - RNA, 23 nt, synthetic construct
  source 1..23: mol_type = other RNA
  modified_base 7: mod_base = OTHER; note = 5'-methyluridine-3'-phosphate
  modified_base 8: mod_base = OTHER; note = 5'-methyluridine-3'-phosphate
  modified_base 19: mod_base = OTHER; note = 5'-methyluridine-3'-phosphate
  modified_base 22: mod_base = OTHER; note = 5'-methyluridine-3'-phosphate
  modified_base 23: mod_base = OTHER; note = 5'-methyluridine
acccgcttcaaggacacctactt

SEQ ID NO: 461 - RNA, 23 nt, synthetic construct
  source 1..23: mol_type = other RNA
  modified_base 10: mod_base = OTHER; note = 5'-methyluridine-3'-phosphate
  modified_base 13: mod_base = OTHER; note = 5'-methyluridine-3'-phosphate
  modified_base 14: mod_base = OTHER; note = 5'-methyluridine-3'-phosphate
  modified_base 17: mod_base = OTHER; note = 5'-methyluridine-3'-phosphate
aaggacacctacttcgtgacagg

SEQ ID NO: 462 - RNA, 23 nt, synthetic construct
  source 1..23: mol_type = other RNA
  modified_base 1: mod_base = OTHER; note = 5'-methyluridine-3'-phosphate
  modified_base 2: mod_base = OTHER; note = 5'-methyluridine-3'-phosphate
  modified_base 5: mod_base = OTHER; note = 5'-methyluridine-3'-phosphate
  modified_base 14: mod_base = OTHER; note = 5'-methyluridine-3'-phosphate
  modified_base 17: mod_base = OTHER; note = 5'-methyluridine-3'-phosphate
  modified_base 22: mod_base = OTHER; note = 5'-methyluridine-3'-phosphate
ttcgtgacaggcatcgtcagctg

SEQ ID NO: 463 - RNA, 23 nt, synthetic construct
  source 1..23: mol_type = other RNA
  modified_base 3: mod_base = OTHER; note = 5'-methyluridine-3'-phosphate
  modified_base 10: mod_base = OTHER; note = 5'-methyluridine-3'-phosphate
  modified_base 12: mod_base = OTHER; note = 5'-methyluridine-3'-phosphate
  modified_base 22: mod_base = OTHER; note = 5'-methyluridine-3'-phosphate
agtacgggatctacaccaaggtc

SEQ ID NO: 464 - RNA, 23 nt, synthetic construct
  source 1..23: mol_type = other RNA
  modified_base 1: mod_base = OTHER; note = 5'-methyluridine-3'-phosphate
  modified_base 3: mod_base = OTHER; note = 5'-methyluridine-3'-phosphate
  modified_base 13: mod_base = OTHER; note = 5'-methyluridine-3'-phosphate
  modified_base 21: mod_base = OTHER; note = 5'-methyluridine-3'-phosphate
  modified_base 22: mod_base = OTHER; note = 5'-methyluridine-3'-phosphate
tctacaccaaggtcaccgccttc

SEQ ID NO: 465 - RNA, 23 nt, synthetic construct
  source 1..23: mol_type = other RNA
  modified_base 7: mod_base = OTHER; note = 5'-methyluridine-3'-phosphate
  modified_base 8: mod_base = OTHER; note = 5'-methyluridine-3'-phosphate
  modified_base 11: mod_base = OTHER; note = 5'-methyluridine-3'-phosphate
  modified_base 16: mod_base = OTHER; note = 5'-methyluridine-3'-phosphate
  modified_base 20: mod_base = OTHER; note = 5'-methyluridine-3'-phosphate
accgccttcctcaagtggatcga

SEQ ID NO: 466 - RNA, 23 nt, synthetic construct
  source 1..23: mol_type = other RNA
  modified_base 2: mod_base = OTHER; note = 5'-methyluridine-3'-phosphate
  modified_base 7: mod_base = OTHER; note = 5'-methyluridine-3'-phosphate
  modified_base 11: mod_base = OTHER; note = 5'-methyluridine-3'-phosphate
  modified_base 19: mod_base = OTHER; note = 5'-methyluridine-3'-phosphate
  modified_base 23: mod_base = OTHER; note = 5'-methyluridine
ctcaagtggatcgacaggtccat

SEQ ID NO: 467 - RNA, 23 nt, synthetic construct
  source 1..23: mol_type = other RNA
  modified_base 2: mod_base = OTHER; note = 5'-methyluridine-3'-phosphate
  modified_base 10: mod_base = OTHER; note = 5'-methyluridine-3'-phosphate
  modified_base 14: mod_base = OTHER; note = 5'-methyluridine-3'-phosphate
atcgacaggtccatgaaaaccag

SEQ ID NO: 468 - RNA, 23 nt, synthetic construct
  source 1..23: mol_type = other RNA
  modified_base 3: mod_base = OTHER; note = 5'-methyluridine-3'-phosphate
  modified_base 4: mod_base = OTHER; note = 5'-methyluridine-3'-phosphate
  modified_base 23: mod_base = OTHER; note = 5'-methyluridine
gcttgcccaaggccaagagccat

SEQ ID NO: 469 - RNA, 23 nt, synthetic construct
  source 1..23: mol_type = other RNA
  modified_base 3: mod_base = OTHER; note = 5'-methyluridine-3'-phosphate
  modified_base 6: mod_base = OTHER; note = 5'-methyluridine-3'-phosphate
  modified_base 11: mod_base = OTHER; note = 5'-methyluridine-3'-phosphate
  modified_base 14: mod_base = OTHER; note = 5'-methyluridine-3'-phosphate
  modified_base 16: mod_base = OTHER; note = 5'-methyluridine-3'-phosphate
  modified_base 20: mod_base = OTHER; note = 5'-methyluridine-3'-phosphate
  modified_base 21: mod_base = OTHER; note = 5'-methyluridine-3'-phosphate
ggtcataacgtcctctccattaa

SEQ ID NO: 470 - RNA, 23 nt, synthetic construct
  source 1..23: mol_type = other RNA
  modified_base 2: mod_base = OTHER; note = 5'-methyluridine-3'-phosphate
  modified_base 5: mod_base = OTHER; note = 5'-methyluridine-3'-phosphate
  modified_base 7: mod_base = OTHER; note = 5'-methyluridine-3'-phosphate
  modified_base 11: mod_base = OTHER; note = 5'-methyluridine-3'-phosphate
  modified_base 12: mod_base = OTHER; note = 5'-methyluridine-3'-phosphate
  modified_base 17: mod_base = OTHER; note = 5'-methyluridine-3'-phosphate
  modified_base 22: mod_base = OTHER; note = 5'-methyluridine-3'-phosphate
gtcctctccattaaagtgagatc
